United States Patent Application Publication US 2022/0031776 A1 - sequence listing, part 6

SEQ ID NO: 186 - DNA, 24237 bp, Unknown
  source: /note="Description of Unknown: MKP2_2161_1 Mutant Bacteria sequence"
gacagcgaccaccagggtcgacgctagggagggcgtaggcggcggccgaggtgtataagagacaggaaggggaagtacctgacggtgagcgaactgaaaaccgcagtatttgccatcacgcagtcgtttaaccgcgctgttccgctggaggagcagctgcgccagctggccgcgcttcccgttgatcaaccctggccagccgcgcggggaagcctcgcggagctgcatctgcaacagctgatagtggagtatgccctgctgaagcgaaaacagccggcgtcgccgaccgctgcgctccccgcaaccggtgagccctcggtgagtgaggcggtgaaataaagtgtgcgcatggcaacattttctttacatcaatattgcaagaaccgaacgcccttcgtagtctgaaaatgatttaaatataccgtttgtagttgtattgaaaattttatttcgatttctgagggcatactatgaagcactgtaaaatcatcctgttagtaggccttctggccagttccgcttcggcattagcagagaagatcggcgtctcaatggcctacttcgatcaaaactttctcactattatccgccagtccattgagaaagaagctcaagcccgccacgtcgacgtacagtttgaagacgcccgcggcgacaccggacgccaggccgatcaggtgcagagcttcatcgcctccggcgtggacgcgatcatcgtcgacccggtggactccgccagcaccccgcagctgacgaagatggcgcagcaggccaaaatgccgctggtgtatgtgaaccggacgccgggggataaaacgttaccgcccggcgtggtgtttgtcggttcggacgagcgggagtctggcacattgcagatggaggcgctggcgaagctggcaaactacaaaggcaacgtcgccatcatgatcggcaatctcaccgacgccggcgcgctgcagcgcaccaaagatgtggagcaggtggtggccaagtatccggcaatgaaagtggtgcagaaacagccggccaactattcccgcagcgagggaatggatctgatgcagaactggacgggtaacggagaagcgattgatattgtggcggcgaacaacgatgagatggcgattggcgcggcgatggcgctggagaaaagccagaagaagctgctgatcggcgggatcgacgccaccccggacgggctgaaagccctggccagcgataagattcaggtgacggttttccaggacgccgtcggtcagggcaaaacggccttagcggtagcgctgaagctgattaaaggagaaaaggtcgagtctcatgtctggatcccgtttgagttagtgaccaaagaaaacatgcagacctatgtggaaaagagtcattaacggcaaggcacaggtgcgcgaacctggctgataaaaccgggctgataatgcgacgcccgggcaactaaatcggaggaaaaaggcatggcaacggcaagaagcggctatacgctgcaggtgataaaggcaggacagcaggggcatgttgaaatgagatgggggcatctcgcagacgttgatacgcgcgcggcggcgacggctatcatgcagcatatcgggcgttcttcgtcctcgcggggccagctggagatcagcctgtcgctgaccaatgccgccagcggtatctcggtggagcttcatcacccggcctctggggaaagcgccaccccggcttttattgaggctgagttaaagaaaattgtgcagatcgttgatggctacgaggcggcagaagatacccatattgtggagtagcgtgtcgcctgggtaaaaaaaaatccacgccgctgcgtggattttttttgcgcggtggcggcgaaaacgccagccagcgggattagacgttgaacaggaagttcatcacatcgccatctttcacgatgtagtctttaccttcagcacgcattttaccggcttctttcgcgccctgttcgcctttgtaggcaatgaagtcttcataagcgatggtctgcgcgcggataaagcctttttcgaagtcggtgtggatcttaccggctgcctgcggcgcggtcgctccgaccgggatggtccatgcgcgaacttctttcacgcccgcggtgaagtaggtctgcaggttcagcagagcgtaaccggcgcggatcacgcggttcaggcccggctcttcgaggcccagctcagccatgaactcgtcacgctcttcatcgtccagctcggcgatgtccgcttcaacggcggcgcacaccggcaccaccacagacccttcctgctcggcgatggcgcgaacctgatcgaggtacgggttgttctcgaaaccgtcttcattgacgttcgcgatgtacatggtcggcttcagggtcaggaagctcagatagcggatggcctctttctcttctttggtcagatccagcgcacgcagcataccggcattttccagctgcggcaggcatttttccagcgcggccagctcaaccttcgcgtctttatcgccgcctttggcttttttggagacgcggtgaatcgcgcgttcgcaggtatcaaggtcagacagcgccagttcggtgttgataacgtcgatatcttccgccgggttcactttccccgcgacgtgaataatattatcgttttcaaagcagcgaaccacatggccgatggcttcggtttcacggatgttggtcagaaactggttgccaagaccttcacctttggacgcgcctttcaccaggcccgcgatatccacgaactccatggtggtcggcaggatgcgctgcggtttgacgatttcagccagcttgtccagacgcggatcgggcatcggtacgacaccggtgttcggctcaatggtacagaaggggaagttggccgcttcaatacccgctttggtgagcgcattgaacagggtggatttgccgacgttgggcaaaccgacgataccgcatttgaatcccatgatttaaatcaccttaatctttggataatcaatctgttacaaggaacagattgcagaaaattgaatagctttgcctattatacacggtgcgcggcaaaaatgccgcacgacaacggcttattgcgccttaaaggcgtgcaaacggttggtcgctttggtcagcccgtcctttaaccagatttcggtacagcgcgccgcttcgtcgacagcgtcatcgatcagtttctgctcgctggccggtggtttgccaagcacaaagccgacaaccttgtttttgtcgcccggatggccgattccgacgcgtaaacggtgaaagttcgggttattgccgagcttactgatgatatccttcaggccattgtggccgccatggccaccgccaagcttaaatttcgccacgcccggcggtaaatccagctcgtcatgagcgaccagaatttcatccgggttgatgcgataaaaggtcgccatcgcggccacggctttaccgctgaggttcataaaggtagtggggaccagcaggcggacgtcctcgcccgccaggttgatgcgcgaggtgtagccgaagaatttgctctcttcgcgcagcggcgcacgatggcgatccgccagtaaatccacataccaggcgccagcgttgtgccgggtggcggcatattccgcaccggggttggccaggccgacaatcagtttaatggtcacgttttctatcctgcatggggcattctctgccgcgtagtgtactgtctgcgggcgcgcttgacaaaattctggctattagacaatacccgcattgatgatttactcactaaatcattagaatttgatatggttcatagacttatttgtaaatttttgtctattcgctgttcactaatgtgatcgtggacgcactccgcagaagagaccttgtctatactacacctataagatttggggacattccctggcaacccaaagtccggaggtgacacatgaaacgcaaaaacgcttcgttactcggtaacgtactcatggggttagggttggtggtgatggttgtgggggtaggttactccattctgaaccagcttccgcagcttaacctgccacaattctttgcgcatggcgcaatcctaagcatcttcgttggtgcagtgctctggctggccggtgcccgtattggcggccacgagcaggtcagcgaccgctactggtgggtgcgccactacgataaacgctgccgtcgtaaccagcatcgtcacagctaaccgtagcatgatttcgcgcatcggccgctgaaggccgatgcgcttttctgtgtctcactttatctcttcctctttttcccgccatattacgcccccattccgtcctggccttcgtgctgctatggttgccagcaaaaatgaatagcaagcgcggtttttgcttgaccctgacgttacgtcaggctgcagagtagcggacctggccacagagaggagcagtcatgttaattcaggtgggagagctggcgaagcgtgccggactgacggtacgtacgctgcatcattatgaacagacggggctgttaacgccttcggccagaagcgaggcgggctatcggctctataacctgtccgcggttcagcgcctgcatatgataaaggcgctggcgcaggccgggctaacgctcgccacaatcaaggactatctcgatcggcaaacgctgtcgctgcccgagctgctgacgcagcagatagatatgctcaacgcccagctacgcgatgttggcaggctgcgcgaccgactattggtgctgcgcgaggcgctggcgagcggcaatgaacccgatctggagtcctggctacagacgctggagttaatgaaaatgtacgatcgttggtttagtcaacaggagttagccgcgctgccgtttgcggcacaggatgaacagagggcgcaggcgtggcgcgagctaacggaggaggtgcagacgctgatggcgagcggctgcccgacggacagtccgcaggcgatgcgtctggcgacgcgctggatggagcgcctggagcaggatacggccgggcgtccggagtttctgacccgcctgaacgagatgcatgccgccgagccgcagatggttgaacagaccggcgtcacgccggcaatcatcgcctatatcaccgaggcctttgccgaaagcaaactggccatctgggcgcggtaccttgacgaagaagagatggcgttcacccgccagcactattttgaccggctacaggagtggcctgcgctggtggcgaagctgcatcaggcgtgccgggagggcgtagcgccggactcggcgtcgggtcaggcgctggcccgggtgtggcttgaactgtttcagtcctacgccggtacccggccgcagacgttgcagaagtttcgtcgggcaatggagcaggagccgcatttgatgaagggcacctggatgacgccggcggtgctgagctggctgcagcaggcgaccggatccttgatgcggcaggcgcagggacctgccgccgggtgatcacaggtcagccagcgcggcctgacgatcggggtagaagctcaggcgtccgggcagcggcttgacgccggcgcgcgctagcgtgcgtagcggctgaaactcgaggttagatacgcgcaattcacagccttccggcagcttgttcacaaagcgctggaaggcatccaggccaccggcgtcgagaaccggcaccgcgtcccatttcagcaccacgatgcgcttgccggcgatccgggtctccagatcgttgaacaagccttcggcggcggcaaagaacagcggcccaattacccgcagcaccagcacatcgtctggcacctcgacgttgaccggcgccagatgagtcatgcgtgcgatacggcgcataaacaacagcgaagccagcacgatcccgacgctgatagcgatcaccatgtcaaacagcaccgttagcgacatgcacatcagcatcaccacgatgtcgtccttcggcgcgtggcgcagcagattgatgactttatgcgcctcgctcatattccatgccaccatcagcagcagggcggccatcgccgacagcggcagccaggagagcagtggggcgaggatcagcagcgccaggatcaccagcagggcgtggatcacggcggcaaccggcgatgtggcgccggcgcggacgttcgccgccgagcgggcaatcgccgcggtggcagtgatcccgccgaagaacggcgcgacaatgttgcccagcccctggccaatcagctcgctattggctttgtgcttggtgccggtcatgccatcaagcaccaccgcgcacagcagagattcaatggcgccgagcatcgccattgagaaggcggcaggcagcagagcctgcagcgaggcccagctcagggtaaagtttgagcccggcatatcccagggcaataccagctgcggcagcagctgcggaatgccattgccctgagtgccgtccgccagctgataatggaactgcgagccgatcgtcgcgacatcgccgccgagcaagttgaccaccagcatgaccgcgcagccgcccagcagcgccgggaggtggcccggcaggcggatacccagccgcggccagaggatcagaatgccaagagtaacgacgccgatggcggcatcgccaacgttaatggtcggtagggccatcgccagcgccgccactttctgcagataatgctccggcacatggggcatctgcaggccgaggaaatctttaatctgcatggtgccgatggtgataccgatccccgaggtgaagccgagggtgactgacagcgggatatattcgatcaggcggccaaagcgcgccaggccaaagaggattaaaaagatccccgacatcagggttgccaccagcagtcccgccagaccaaactgctgggaaaccggatagaggatcaccacaaaggcggcggtcggaccggaaacgctaaagcgtgacccgccggtcaaggcgatcacaatccctgccaccgctgaggtatagaggccgtactgcggcggcacaccgctgccaatcgccagcgccatcgccagcggaatcgcaatgatcccgacggtgatcccggcgatcaggtcacgcgtgaagcgggcggtggtgtacttttctttccaacaagcgtcgatgagggcgcggaaaggcatcacatgtgaggaaaataatctgttcacaataatgtttcatccatgagcgcatcatctgtcaactaaatggcaggtgaaggaggcattgatcatacaaataaggtgcggagacaaaaaaacccgccgcagcgggtttttgtgctgggctcgattaatgttcgaacatagcagagatagattcttcattgctgatacggcgaatagcttcagccagcataccggagagcgtcagagtacgcactttatccagcgctttaatgtctggtgccagcggaatggtatcgcagacgacaaattcatcaatgacagagtttttgatgttctggatagcgttgccggagaagattgggtgcgtcgcgtaagcgaatacgcgtttcgcgccacgctctttcagcgcttctgccgctttacacagggtgccgccggtgtcgatcatatcgtcgaccatcacgcagtcacgaccggcaacgtcgccgatgatgtgcatcacctgggagacgttggcgcgcggacggcgcttgtcgatgatagccatatcggtatcattcagcagtttggcgatagcgcgggcacgcacgacgccgccgatgtccggagaaaccacaatcgggttgtccaggttcagctgcagcatatcttccagcaggattgggctgccgaacacgttatcgactggcacatcgaagaagccctggatctgttctgcgtgcaggtcaacggtcagcacgcggtcaacgccgacgctggacagaaaatccgccaccacttttgcggtgattggcacacgagcagaacgaacacgacggtcctgacgagcataaccgacgtaagggataacggcggtgatacgacctgccgaagcacgacgcagagcatcaaccataacaaccagttccatcaggttgtcattggtgggagcacaagtggactggatgatgaaaatatcaccaccgcgtacgttttcattgatttgtacgctgacttcgccgtcgctaaaacgacctacagcggcgtcgccaagagaagtgtacaggcggttggcaatacgttgtgctagttccggggtggcgttaccagcaaaaagcttcatatcaggcacgagaagaacctcaggcatgcgtccagtggtggatgaatgggccaataatgtgcgggatggcgccattcgatccagtcggtgtatttaaagagcacgatgcaacgtctggaacagggtgacgttgtcaccgtaactcaatttccccggctgactcattatcaatgtgccatcacggcgcaggattcagagcagggcctgcttgagcggcgaaaggttaactccgcgcgccacaaagccatttagccatgccggggcagtgtccagcacctgacgggcagcggattcggtgttaaattcagcaaacacacaggctcctgtgccggtcaggcgtgacggcgcatattctaacagccaggaaagcgcggcatcaacctcgcgaaaacgttttcttgcgataagctcgcaatcgttgctgaattcacaatttaataacgtattaattgaccggcgcggggtatttcgtggtagctccggatcgcgaaaaatgatcggcgtcggaatactgacccccgggtgggccaccaggtaccatttttcctcgggttctaccggcgtcagtatttcacccaccccctcggcgaaggcggcatggccgcgcacgaaaaccggcacatcggcccccagctgaaggccaagagtcgccagctcatcttccgagagaccgcagccccacagatggttgagcgccaccagcacggtggcagcattggaggagccaccgcccaggccgccgcccatcggcaggcgcttatcgatactgatatcggcgccgctgcccgccggcaggcgatcgctttcgctggcggcatgcatcagcagacgcgcggcgcgaacgatcagattctcctcgtccggcacgccggccaccggcgtcagcaggcgcagttggccgtcagtacgcggttcgatggtcaacgtatcgccgtaatcgagaaactgaaacagcgtttgcagggtatggtaaccatcggcccgctggccggtgatatataaaaacagattcagttttgcaggagagggccagcgggtcatcatttcacgatccagttatccatcttcagcttgatgcgctgagcgccattgttcagctcgacattggacggtagggctggctgggtatcgctggtgtagccgccgtaggtcacgtgccaggttttgccgttttgcgtatagttcagttcacgcagacggtaccgatcgtccagcgaatagtcggtggcgtcgcccggtaggccgatgatccactggcgcaggctgttcaacgggatcggcatcccggtcagacggccaatcatctcttcggcatcagtggcggtataggtctggcctttgttatcgatcagctgcacgctgcccggctgcgcggtcagcgacagctcggtgctgcccagcgggttggtcagcagcaggcgatagcggtcctggccggtttgctgccagaagaagcgggcatagactttttgctcatcggaaagataggcaaacgccccgcgggtctggaactgattgaggctgcggacagcctgctggtgctgacgccactgcggcgaatccgggcttttgccaggcccttgcggcgtatgaagagaacaggcggtgaggacgaggctggccagcggcagcaggcggaacagtcgattcataatgatgacaaatccttgatgtctacagggaaaaacggcgacagggaacagcgggccgatttgtgtagcaggttacatttataacccttaatgctagcgtcgccgggcgatagcgtctacgttcaagttgtctgaaatcaaaaaattaaccttaatggcggtcttgctttaactattactccaaaaggggagcctctcttttattgattacgcgcatcctgtatgatgcactcagactaaccttagcaacgctggtactactccctcacaatgacccttttagctcttggcatcaatcacaaaacagctccggtcgccctgcgagaacgcgtcacgttttcgccggaaacgctcgataaggcgctggagagcttgctggctcagccgatggtgcagggtggggtggtgctgtcgacctgcaaccgcacggaactctatctcagcgtcgaagagcaggataacctgcaggaagcgctgatccgctggctgtgcaactaccacggcctcaacgaagaagacctgcgaaaaagcctttactggcatcaggataatgacgccgtcagccatctgatgcgcgtcgctagcggcctcgattcgctggtgctgggcgagccgcagatcctcggccaggtgaaaaaagccttcgccgactccagccgcggccatcttaacgtcagcgagctggagcggatgttccagaaatccttttcagtggctaagcgcgtgcgtaccgaaaccgatatcggcgccagcgcggtctctgtggctttcgccgcctgtaccctggcgcggcaaatctttgaatcgctctccagcgtcaccgtgttactggtcggcgccggggaaaccattgagctggtagcgcgccatcttcgcgaacatcacgtgcgcaaaatggtgatcgccaaccgcacccgtgaacgcgcccaggcgctggcggaggaagtgggcgccgaggtgatagccctcagcgatatcgacgaacggctgaaagaggccgacatcattatcagctccaccgccagcccgctgccgatcatcggcaaaggcatggtggagcgtgcgcttaaggcgcggcgtaaccagccgatgctgctggtggatatcgccgtcccgcgcgacgttgaaccagaggtcggcaaactggctaacgcctacctctacagcgtcgacgatttgcaaaacattattcagcataacctggcgcagcgtaaggctgccgcggtgcaggcggaatcgatcgtcgagcaggaaaccagcgaatttatggcctggctgcgcgcgcagagcgccagcgagaccattcgcgaataccgttctcagtctgagcaggtccgtgaggagctgacggcgaaagcgctggccgcgctggagcagggcggtgatgcccaggaaattatgcaggatctggcgcgcaagctcactaaccgcctgatccacgcgccaaccaaatctcttcagcaggccgcccgtgacggggacgacgaacgtctgcatattctgcgcaacagcctcgggctggaatagcgcacctttctcttattttcaggacagggtgaattcacgcctatgaagtcttctattgttgccaaactggaagcgttgtacgagcgccatgaagaagtgcaggcgctgctcggcgatgccgcgacgattgccgatcaggataaattccgcgcgctgtcgcgggagtatgctcaactgagcgatgtggcgcgctgctataccgactggcgtcaggtgcaggaggatattgaaaccgcgcagatgatgctcgacgatccggaaatgcgcgaaatggcgcaggaagagctgcgtgacgccaaagaaaaaggcgaccagctggagcaacagctgcaggttctcctcctgccgaaagatcctgatgacgagcgtaacgccttcgtggaagtgcgcgccgggaccggcggcgacgaagcagcgctgtttgccggcgatctattccgcatgtacacccgttacgcagaatcgcgccgctggcaggtagagatcctcagcgccaacgaaggtgagcacggcggctttaaagaggtgatcgccaagatcagcggcgacggcgtttacggtcggctgaaatttgaatccggcggccatcgcgtgcagcgtgtgccggccaccgaatcgcaggggcggatccacacctccgcctgtacggtggcggtgatgccggagctgccggaagccgaaatgccggacattaacccggcggatctgcgcatcgataccttccgctcctccggggcaggcggtcagcacgttaacaccaccgactcggctatccgcattacccacctgcccaccggcatcgtggtggagtgccaggacgagcgttctcagcataaaaacaaagccaaggcgctgtcggtgctgggcgcgcgcatccgcgccgccgaagtggccaaacgtcagcaggcggaagcctccacgcgccgcaacctgctgggcagcggcgaccgcagcgaccgcaatcgcacctataacttcccgcagggccgcgtgaccgaccaccgcatcaacctgacgctctaccgtctggatgaggcgatggagggcaaactcgacatgctgattgagccgattgtccaggaacatcaggccgatcagctggcggcgctgtccgagcaggaatgatgacctttcaggcctggctgcagcaggcgatcgcccgcctggcggagagcgacagcccgcgacgcgacgccgagatcttgctgggacacgttaccggccgggcgcgaacctggattttggccttcggtgaaacgacgctctctgctgacgaggcggcgaggctggaggcgctcctggtgcgacgccagcgcggggaacctattgctcatctggtcgggcagcgcgagttttggtcgctgccgctgttcgtctccccggcgacgctgatcccccgcccggataccgaatgtctggtagagcaggcgctggcgcgtctgccaaccgcgccgtgccgtattctcgacctcggcaccgggaccggcgccattgccctggcgctggccagcgaacgtccggactgtgaggtcaccgcggtggacgtgatgccggacgccgtggcgctggcgttgcgcaatgccgaacatctgggcatcgctaacgtgacgataagtcaaagcgactggtttagcgcgctggacgggcagcgcttcgccacgatcgtcagcaatcccccctatatcgacgccgccgacccgcatctcgccgaaggcgatgtgcgctttgagccgttgacggcgctggtcgcaggcgaccaggggctggccgatctggcgcatatcatccgcgagggacggcagtatctgcagcccggcggttggatgctgctggagcatggctggactcagggcgaggcggttcgcgcgctgttccgcgaagcgggctatctggacgtcgcgacctgtcgcgactatggcgacaatgagcgtctgaccctcggacgtttacccgacatggagaatgttggctgatgaacttattcacggctgtcctctacctgcacattgccacagtggcggtgtcggtaggattgttcgttttacgttactggtggatgtatcaccagagcccgctgctgaaccagcggtgggtgcgaattgcgccgcactgcagcgatacgctgctatttctcagcggcgcagggttaatggcgataacgcactacctgccgttcacagaagacggcgcatggctgactgaaaagctgtttggcgttatcatttacatcgcattaggttttatcgcgttgggccgtcgtcgtccgcgcagccagcagagccgttttatcgcgttcctgctggcgctggtggtgttgtttatcatcattcaactcgccatcacaagaataccgatactggggtaggtcatggggtcattagcggatttcgaatttaacaaagcgccattgtgtgatggcatggtcctcatttctgaacaggtccgcgacgattttccgtcgcgttttgtcgaggaagagctgcagcgattgctgcgcctcgcgcaggaggagattgcgccgtcgtgggaccaggagcgccagatagaacgattgctggagctgttttatgacgagtggggctttggcgcctcgcagggcgtgtatcgtctttccgacgcgctatggctggataaagtgctggttaaccgccaggggagcgcggtgtcgttaggcgcgatcctgctgtggatcgcccagcgcctggcgctgccggtggtgccggtgatcttcccgacccagatgctgctgcgtgcggacccggaaaccagcgaagagatgtggctgattaatccgtttaacggcgagaccctcgacgagcataccctggaggtatggctgaagggcaacatcgggccggtggcggaactgtttaatgaagatctcgacgaagcggataacgccgaggtgatccgcaagctgctggacaccctgaagtcggcgctgatggaagagcggcagatggagctggccctgcgcgccagcgaagcgctgctgcagtttaatccggaagatccgtatgagatccgcgaccgcgggctgatatacgcccagctggactgcgatcacgtggcgctgttggatctgagctatttcgttgagcagtgcccggaggatccgatcagcgagatgatccgcgcgcagatcaacacgatttcgcataaacaaattacattgcattagtctggaaccattccggttacaccctgataaggcgaacttatgaaacaaaaagtggttagcattggtgatatcaacgtagcgaacgacctgccgttcgtgctgttcggcgggatgaacgtgctggagtcgcgcgacctggcgatgcgtatctgcgaacattatgtcaccgttacgcagaagcttggtattccctacgtcttcaaagcctcctttgataaagccaaccgttcctccatccactcctatcgtgggccgggtctggaagaagggatgaagattttccaggagctgaagcagacctttggcgtgaaaatcatcaccgacgttcatgaagccagccaggcgcagccggtagctgacgtggtggacgtgatccagcttccggctttcctcgcgcgccagactgacctggtggaagcgatggcgaagaccggggcggtgatcaacgtcaagaagccgcagttcgtcagcccgggtcagatgggcaacatcgtcgataagtttatcgaagggggtaacgacaaagtaatcctctgcgaccgcggcgctaacttcggttacgacaacctggtcgtggatatgctcggcttcggcgtgatgaagaaagcctccaacaactcgccggtcattttcgacgtcacccacgcgctgcagtgccgcgacccgtttggcgcagcctccggcggtcgtcgtgcgcaggtgagcgagctggcccgcgccggtatggcggtaggtatcgccggtctgtttattgaagcgcatccggatccggaccacgcgaaatgcgacggcccgtccgcgctgccgctggataaactggagccgttcctcaaacagatgaaagcgattgacgatctggtgaaaagcttcgacgagctggataccagcaagtaagcctgactgcatcagtaaaaaagcctgccggcgtcaaaaccggcaggctttttttcgcccggactccgccgggtgggaaaacggggtcaggcgaaaatggtcatcagataggcggcgaacagcgccatgtgggccgcgccgttcagcacattggtgcgtccggtggagaaggagatatggcacagcaccagcgaggcgaccatcaccaccatctccggggcgccaaggccaaagcgcagctcattgccggtcaggaaggcgatgagggtgaccaccgggaccgtcagcgagatggtggccagcacggagccgaaaaacagattcatcgcccgctgtacctgattgttgagcaccgctttcagggcgccaaggccttccggcgacaggatcagcagagccaccaggaagccggtaaatgccaccggggcattcatgctggtcaacagcgtttccagcgggttagcgttcattttggtaaccgcgatcactgccaccaggtgcaccagcagccaggcggtatgccacccgctgctgtgggcggacggtttaccgtggtgcgggtcgtcatcgtcgctgtcgtcttcatgctcataaacaaacaggctctgatgggttttggtctgaataagcaggaaaacgccgtacatggccgccgaaattaccgccaccagcagcgattgcccggtgctgaagttcgcgcccggcagcgccatcggaaagaccagcacgataatcgctagcggaaacagggcgataagatactgcttaatgccgaacagattcatatattgggtggcgaatttacgcccgcccagcagcagagagaaaccgaccagaccgccggtgacgatcataataatggagtagagggtatcccgcatcaaggtcggcgcggcgtcgccggtggccattaaggcagagatcaaactgacctcaaggataaccaccgacaggcttaaaatcagggagccatagggttcgcccaggcggtgggcgaggacgtcggcgtggcggaccacgctgaaggcgctgctcaaaatgccgaccagtgcgaggatattgatcgcgatgaccactggcagtgactggctgctgccccagaaaaacagcaccgccagcgccagcaccggaaagacgagggaagactccttatggcgggtttttaccgcctcatgtgcatgggtcatgaaccatctccatttatgcaggtgttataattataaaaacgtagggcggtaaagtaacagatcttgctaaattaccgctggttttttacttaaatttacgggtatcgagggatatcttgattagtttattataatttatgtttacttatatttagttcttattattcagataattactaaaataatttttctactcattttgaccttgatagccagccgactgcgtaccagacttaaacttaatgctcaaacaggaggtcagtatgccctatcgcagtaaacaagaactccccgacagcgttcagcatgtactgcctgcccatgcgcaggaaatttataaagaagcgtttaacagcgcctgggatcaatataaagataaagacgagcggcgcgatgacgccagccgcgaagagacggcgcacaaagtcgcctgggcggcggtgaagaacagctatgagaaaggcgatgatgataagtggcataaaaaaaaataatcgctgacgccgctttttcgcttgccagcgccccgctgattgcttattgaaagataaagctggataatatttcagcaatattgacggatgcatgagacgaacgccgggaagcgggcagtggcggaggtagtaaacagtgttaactcgtgatttcttaatgaatgcggattgtaagacagcgtttggcgctattgaggaatcgctactctggtcggcagaacaacgtgcagcctcgctggcggcgacgctggcctgccgcccggatgatggctcagtatggatctttggctacggttcgcttatctggaacccggcgctcaattatcgcgagtcctgcaccggcacgctgccgggctggcaccgcgcgttttgcctgcggttgaccgccgggcgcggtagtgcctgccagccgggacgcatgctggctctcaaagagggcggccgaaccaccggcgtcgcctatcgtctgcctgacgacacgctggaggaggagctgaccctgctgtggaagcgggagatgatcaccggctgctatctgcccacctggtgcaagctggagctggacgacggacggacggtgaatgccctggtgtttattatggatccgcgccatccactgtttgaaccggataccagtgcccaggttatcgccccgctaatcgcccgggccagcgggccgctcggcaccaacgcccagtatctgttttcgcttgagcaggcgctgcgtaagctgggcatgcacgatgccagtctcgatgacctggtggccagcgtccgcgcgctgttgggcgagagtccgacgccgggcctggcctgagcgcgcgcaaaagaaaacgcccggcatgaccgggcgtccgattgctgaccagtaaggaaaaagcgtggtttttccttactggtggttatcagccgaaaatcaataaattgattttccttgttatttttctggtgcaatctgcaagtacaatgattgcatggggtttgtcatgaatctcacgcccggcatgaccgggcatgtgttctggcagtgacggtcaggccggcacgtagctgatggagtgctccagcgactggctgtgactgtcgataagcacgttccaggtgccgctgtagggcaccgtcagataggcgctgtcccgatcctgcacgctcagaatatccgcatgactgtcgcccgggaccttcgcgctcatcagatgaatatggcagcgctctgagcaccgcaccaccagcgtgtcaccaccaaataacgtcaaacttgctttaaccatcgccattttataccccgtttctgtcccgctacagcatcctgcccacccagtcctcgcgtgatattgttcacactttgctctgtgcatcacaccaaacggcgcgggtcgggatgctgattttgatcaaaaaaagggataaagattaaacaaaaatgacgttgttcctgaaagcattcagctaacgttttttttacctctgcaggcggcgaaacctgatatttcctgccgtttggcgccccagattcagaaggtcagcactttatctgccgccagggtccactgggccagctcaacgagagtgccaacctccacgccgtcaaccagcggcagtgcgctgaccccgcggccgtccgcgcaggttttacacagcttcacgggaacctgctgggcggtgaggatctccagcatctgctgcacattatacccttctgccggcttctgcccccgcagcccggcggtgacggcgtcggacatcagaaacagcttgagatcgaggtcggactgctgctcgcgcagggcaatggccaggcgcaggctgttgaacagggattcgctgccgtaggcggcgccgttggcgatgatcacaatacgttgcatacaaactccttcttaaaggcacggttattgctttaggcagtataaagcgttaacccggaggaggggtatgaataatacgactggtcatgcgcacgatgcgacggcctggctgcagctggcgcgtcgcctgcaaaaacaacagcttcagcagcttagccaactgggggaactggccagccagctcagcgcgctggtgcatatgctgcagtgtgagcgcggggcgtcgaatatctatctttgctcgggcggcttgctgtatacagcggagtgtcgggcgggaggggcgctggttgacgagcggctagccctgttttatgccagcctcgaacgggcgcgcgcggtagccggcagcgcgctgtgctggcgtatcgccagagcggttgacgagctggcgcagctcccggcgctacgcgcgcagatcggccgccggcaaattgccgctgaagccgcgacggagcagttcagccgcgtcatccgccatctgctgaacatcgccccgcagctcaatgacagcattgacgatccgccggtggctggtcggatggtcgccctgtacagctttatgcagggaaaagagctggtgggccaggagcgcgcgctgggagcattgggctttacccgcggcgagttcagcgacagcctgcgccagcagctggtggaccgtattgacggtcagcagccctgcttcgacagctttcaggcgctgggcagcccggcgaccgtccagttgttcagaacccagtgccacgccggtctggatattgaacagctgcggcggatcgcctgtacccgtcagccggctgccgacggcggggaaacggcgctgcgctggtttggtctgcaaacccaacggcttgagcaactgcgcgaagtggaagagcaactgatcgacgatctgctggatgccaccgacgcgctgttagcagacgacgcgcctggctggcaggccggagaggaagacgatagcgtgacgccacggctcgataaacagctactgccgctggtgcgccagcaggcctatgagctgcagcagctctccagccagctggcctcgctgaaagacgcgctcgaagagcgcaagctgatcgaaaaagcgaaaagtctgctgatgacgcaccagggaatgcaggaggagcaggcctggcagacgctgcgcaagatggccatggacaaaaatcagcgtatggttgagatagcccgcgcgctgctgatggtgaaggcgatttggccgctaacaccaaaggagtagatgcacaatcgatgggcattctttgcatgccggcggtgcacttttaggtgaaaaaccggctagcgttgggaaaaagcccgccagcgcgctattgccaaagctggcatcccgtttgcattacttattaagtgaataaaagtccgggcaacgaaccaatggcggttcgggtgtccgtggataaaggcgtcctgcagtgcgtatgcactgtcgggcgctttttttttgcgcatggtggagcggatatgggcgacaaattttcaatttcccggcggcgcttgctgcaggcaggggccgcgctgggcggcgcgatgctgctgccgggcgtgatgcaggccgcctgggccggcggctcggacaaaccggagcaaacccgcgtgcgggtcggatttattccgctgaccgattgcgcgccgctggccatcgccgcggcgaaggggtttgaccaaaaatatggcatcaccctggtggcgagtaaggaagccagctgggcggcggtgcgcgacaagctggtggccggcgagctcgacgcggcgcatattctctatggcctgctgtacggcctcgaactggggatcgccagcaagccgcaggcgatggccaatttgatgaccctcaaccgcaatggccaggcgattaccctctccagcgagctgcaggagaaaggggtgaccgacctcggcgggctgaagcggctgatcgaccgcagcgcgccgggcagttacaccttcgcccatacctttcctaccggcacccatgccatgtggctttactactggctggcgagcgccggcatcgatcccttcaacgatgtgcgcaccgtcgtggtgccgccgccgcagatggtgatgaacatgcgcatcggcaatatgagcggcttttgcgtcggcgagccgtggaacgcccgcgctattaacgaccgtatcggcttcaccgcggccacttcccaggatatctggcccgagcatccggaaaaggtgctgggcacccgtcgcgactgggtggaacgcaacccgaacaccgcccgcgcgctggtggcggccctgatggaggcgcagcgctggatcgccgcctcgccggagaacacccgggagacggcccgcctgctcgccagacgcggctggctcaataccaaggagcaatacctcaccggccggatgcttggagagtatgacaacggccttggccgccgctggcaggatgcccatccgatgcgcttctgggccgggggcgaggtgagtttcccgtggctgtcggacgggatgtggttcctcacccagttccgccgctgggggttgctgaagcaggccccggattacctcgcggtggcgtcgcgcattaaccgcatcgatgtctggcaggctgccgcccaggcggtaggagggatcagcgcgccggcagccaggatgcgcagcagcacactaatggacgggacggtctggaacgggtccgacccggaaggctacgcccgccatttctctattcaacgtaagggggcatgagatgaagcaggcacaacgtaagcaaccggtcgtcagcgtggacaacgcgcctggcgaagtgattatcctgccgccggtgcaggtccggcgcaccacgccgaccgtcacgcgctggctgcgtgagctcacccagcgcctgctgcccccgctgttggggctgggtgtgctgctgctggcctggcagctggcggcgatgcatagcaaaggctttcccacgccgctgagcacgctggactcggcgctgaccctgtttgccgatccgttctatcaggacgggcccaatgacatgggcatcggctggaacgtgctggcctccctgcagcgcgtggcggtgggcttcggcctggcggcgctggcgggcattccgctgggggttttgatcggccgttcgctgttcttcgcccgcatgtttaatccgctgattgctctgctgcgcccggtcagcccgctggcctggctgccgattggcctgctgctgttccagaaggcggagccggcttccagctggaccatttttatctgctccatctggccgatggtgatcaacaccgcggagggtgtgcggcggatcccgcaggactatctcaacgtcgcccgcgtcctccagctctcggagtggacggtgatgcgcaaaatcctctttccggcggtgctgccggcggtgcttaccggcgtgcgcctctccatcggcatcgcctggctggtgatcgtggcggcggaaatgcttaccggcgggctggggatcggcttctggatctggaacgagtggaacaacctcaatgtggaaaacatcatcatcgccatcgtcattatcggcgtcgtcggcctgctgctggagcagggcctgatgctgctcgctcgccgctttagctggcaggaaaaataaggagccaacatgaaaccattaattcaggtgcaggccgtcagccaacgcttcaacaccgccagcggtgagttcctggcgctgcagaatgtctccttcgatatcgtcgaaggggagaccattagcctgatcggccactcgggttgcggaaaatcgaccctgctgaacctgatcgccgggatcaccacccctaccgagggcggactactgtgtgataaccgggaaatcgccggtcccgggccggagcgggcggtggttttccagaaccactcgctgctgccgtggctgagctgtttcgacaatgtggcgctggcggtggatcaggtgttccgtcgcaccatgagcaagagtgagcgccgggagtggatcgaacacaacctggcgcgcgtacagatgggtcatgcgctgcacaaacgtcccggggagatctccggcggcatgaagcagcgggtgggtatcgcccgggcgctggcgatgaagccgaaagtgctgctgcttgatgagcccttcggcgccctggacgcgctgacccgcgcccacctccaggacacggtgatgcatatccagcaggagctcaataccaccatcgtcatgatcacccacgacgttgatgaagcggtgctgctctcggatcgggtgctgatgatgaccaacggtccggcggcgacggtcggcgagatcctctcggtcgatctgccgcgtccgcgccaccgcgttcagctggcggacgacagccggtatcaccatctgcgccagcagatcctccatttcctgtatgaaaaacagccgaaagcggcgtaaggaggcggtcatgacgcggcgactggtggtgatcggtaacggcatggcggccacccggctggtgcagcggctggttgagcgcgaccccgcgcggtttgccattaccgtcgtcggcgacgagccgcacccggcctataaccgcattcagctctcgccgctgctggcaggtgaaaaaacggcggcgcagatcccgttgctgccggcggagtggtacacccggcacggggtgtgcctgcggtctggcgaggcggtcgatgaagtcgatattcagcaacggcggctgcgcatcgcggaaacctggctgccgtgggatgagctggtgttcgccaccggttcgcggccctttatcccgccgctgccgggcattgatcgtccgcaggttatgcccttccgcaccctggcggacgtggaacgtattctggcgatacccggcccggcggtggtgattggcggtggggtgctgggggtggaagcggcggcggcgctgcgtcgtcacggcggagaggtcactcttctgcatcgcggcagcggattaatggcgccgctgaccgacgcttttaccgccgatgagctcaggcagcagcttgaagcgcgcggcattcgctgcgtgctggcgtgccgcatcgccgccatcgacgccgatggcgggcggctggcggacgggcgcgtattccgcgccgccagagtggtgctggctaccggcgtgcagcccgacagccgtctggcggcgcagtccggcgtgctgtgccagcgggggagcgtggtcga

SEQ ID NO: 187 - DNA, 23696 bp, Unknown
  source: /note="Description of Unknown: MKP2_2161_1 Mutant Bacteria sequence"
acgtagaactctctcggcgaatcgtagcctttcatcagctcgcggatttcgttctgcaggcccggctcctggtcgtcaaactccagcagcgcgcgcggatgaacgccaatcatgcggttgatgataaattccagccgcgccagaccgacgccttcgttcggcaggcaggcgaagtcgaacgcgcgatccgggttgccgacgttcatcatcaccttcagcggcagatccggcatgtcgccgacgctggagctcttgacgctgaagtcgagcagctcggcgtagacatagccggtgtcgccttcggcgcaggagacggtgacattctgattttcctgaatgcgatcggtagcatcgccgcagccgaccactgccgggatccccagctcacgggcgataatcgccgcgtgacaggtacgcccgccgcggttggtgacaatcgccgaggcttttttcatgatcggttcccagtccgggtcggtcatatcggtaaccagtacgtcgcctggctcaatgcgattcatctcgctgatatcgtggatcaccttgaccggaccggcgccaatgcggtggccgatggcgcgcccttcggcgatgatctgcccctgagcgtggagggtataacgctccatcacctggccgcgggaacgcacggtttcaggacgcgcctggacgataaacagcttaccggtgtggccatctttcgcccactcgatatccatcggacggccgtagtgcttctcgatctgcaccgcctgcttcgccagctcctgcacctcctcgttgcttaacgagaaaatatcgcgctgcgcctgcggcacatcttcgatacgcacctgtttaccgtgctcctgggtcggcgcgtaaaccatacggatctttttcgaccccatggtgcggcgcacgatcgccggacggccagcggccagcgtcggtttgtggacgtagaattcgtccgggttcaccgcgccctgcaccaccatctcgcccaaaccccacgccgaggtgataaacaccacctggtcaaagccggattcggtatcgatggagaacatgacgccggaggaggccagatcggagcggaccatcctctgcaccccggcggagagcgccacgccgcggtgatcgtaaccctgatgcacgcggtaggagattgcgcgatcgttaaacagcgaagcaaacacgtgcttcacggcaacgagcacggcgtcaaagccctgcacgttgaggaatgtctcttgctgcccggcgaaggaggcgtccggcatatcttccgcggtggcggaagagcgcacggcgaatgaggcctcggcgtcatcggcggacagcaggtcataagcatcgcgaatcgcgttttccagttcgctctggaagggggtatcgatgatccactgtcggatctgcgcgcccgctttcgctaatgcggaaacgtcgtcaatgtcggtttcatccagcagcgcatagatgcgctggttaacaccgctttggtccaggaactgattgaaagcatcagcggtggtggcaaacccgttaggtacggaaacacccataccggacagattcgtaatcatttcaccaagggaggcatttttgcccccaactctgtctacatcattcatgccgagttggttataccaaagcaccagcggtgacgagccattgttggacatcgagacaatccttttgtgatttaataccagtgacaaaaatttcacgatcgactgcaggattatcctgacatatttatgaagctgaaaaaaacggtgaatcgttcaagcaaattattttttcatttttcggactgttcccccgatattgctaacttgatgatttttaggaattctgatggaaaacgctggaaataacggcgacaaaaagaaaatgaaccacccttttcataaaaaacaaaaatagcgtttcaattttaacaagagacaaatcaaacagggatatgcttaaatttaatatccgctttcaggcaattaaactcattataccggatggtcaaaatggaaagtgctgtagatcgccacgtattttatatttctgacggtaccgccattacggcggaggtgctggggcatgccgtgatgtcgcaattcccggtcgccatcagcagcgtaaccctgccgtttgtggaaaatatcagccgcgcgcgggcggtaaaggagcagatcgacgccatttatcagcaaacgggtattcgcccgctggtgttctactccatcgtcatcccggaaatacgcgacattattctgcaaagtgaaggcttttgtcaggatatcgtacaggcgctggtggccccgctgcagcaggagctcaacctcgacccgacgccggtggcccaccgcacccacggcctcaaccccggcaacctgattaaatacgatgcgcgtatcgccgccatcgattataccctcgcccatgacgatggcatctcgctgcgcaaccttgaccaggcgcaggtgatcctcctcggcgtctcgcgctgcggcaaaacacccaccagtctgtatctcgccatgcagtacggtattcgcgccgccaactatccgtttatcgccgacgatatggacaatctggtgctgccggcctcgctgaaacccctgcagcataagatgttcggcctgaccatcaatccggagcgtctggcggcgatccgcgaggagcgccgggagaacagccgctacgcctcgctgcgccagtgtcggatggaagtgaccgaagtggaggccctgtatcgcaagaataaaatcccctgcctgaacagcaccaactattccgttgaggaaatagcgacaaaaatcatggacatcatggggctgaatcgcagaatgtactaacacactagtacattattaaaaatttgtttatgctatcacccgtggcctatacaggatcatgccctgctcttgcaataagcagggattggtttatcgtgatgcgcatcacttcccggcattttcgccgcggaagaaacagatttttgagaccccaatgaataaaacagacgaattgcgtaccgcgcgcattgagagcctggtaacgcccgcggagctggcccagcgccatcccgtgacggccgacgtggctgcccacgtctcggcctcccgccgccgaattgaaaaaatcctcaacggcgaagaccgccgactgctggtgattatcggcccctgctccattcacgacaccgacgcggcgctggagtatgcccgccgcctgcagaccatgcgcgagcgctatcagccgcagctggagatcgtgatgcgcacctactttgaaaaaccgcgtaccgtggtgggctggaaaggcttaatctccgatccggacctcaacggcagctaccgggtcaaccacggaattgagctggcgcggcgcctgctgctgcaggttaatgagctgggggtaccgacggccaccgagtttctcgatatggtgaccggtcagtttatcgccgatctcatcagctggggggccatcggggcgcgcaccactgaaagccagatccaccgtgaaatggcctcagcgctctcctgcccggttggatttaaaaacggcaccgacggcaatacgcgcatcgcggtggacgccatccgcgcctcccgcgccagccatatgttcctctctccggacaagcaggggcagatgacgatttaccagaccagcggcaacccgtacgggcacatcattatgcgcggcggcaaacggccaaactatcacgccgaggatatcgccgccgccggcgaggcgctgcgtgaattcgatctgccggaacagctggtcgttgatttcagccatggcaactgccagaagcagcaccgccgtcagctggaggtgtgcgccgatatctgtcagcaaattcgcgcgggctccaccgccatcgccgggattatggccgaaagcttcctgcaggaaggcactcagaaagtggtccccggccagccgttgacctggggccagtcgatcaccgacccctgcctgagctgggaagacagcgaaagattattgagcgagctggctgcggccaccgccacccgcctgtaaccgctccgcccgccgcgcctgcggcgggcaattctcttcgctgactcccctaccaaatccggtaacacgataaataacgcttgccgtcaaaaacaacattattgataatgattatcattgttgccttgatttttattctgagagctatgacgcgtatggataacactgccacagctgaaaaaccaaaagacaatgccccttatcccgtggcgacggacagagagatcagcagtcgggttctgttaggcagcgaaggacgagtagtgattgagcatggcggccagcgctatctgctgcgccagacccacgccgggaagttaattctgaccaagtaagcgccccgctgaacgcggggcgaggcaagttagctcgagcagctgacttccagacgtttcccccagtccggcgggcggcggacgtagtcgtcctcgcgatcggtaaaggggtctgccagcgcggcatgcaggcgctccagctcgtccatatcgcccgcctcagcctgctcgatcgcccgctgcgccagccagttacgtaacaccagcgccggattcacgccctgcatcctctgctggcgctgcgcgtcgtccacctgttcatcacgcagccgcgcacgatacccggcaaaccagctgtcaaaggccgcgcggtcgataaactcatcgcgcagcggcgatgcggcgctgagctgttcgctgtggctcagcaggcggaacgtccgggtatagtcgctcttctcgcggatcatcagggcaaacagcccgtccagcaggtcgttatcccctttctgctggctgaacaggccgagtttatcgcgcatccgctggccataagcggtcagcaaggcgtgctgatactcatccagcgccgcgtttaacgcttcagcgctgataaacggcgacagcgattgggcgagacgctgcagattccacagccccaccgccggctggttttcaaaactgtagcgcccctgataatcggagtggttgcagatgaagtccggttggaaatcgtcaaggaagccatacgggccgtagtcgatggtcagaccgagaatcgacatgttgtcggtattcatcaccccatgggcaaagcccacggtttgccagctggcgatagtctgcgcggtacgcatgacaatgtcacggaaccataacaggtacttatccgcctcatcctgcagctgcggccagtggtggcgaataacatagtcggccagttgctggaccttctgcggctcacggcgatagtaaaaatgttcgaaatggccgaagcgcacatggctctcggccacccgcatcagcatcgcgccgggctccacgcgctcgcggtagaccggggtatcgctggtcaccatcgccagggcgcgcgtcgtcgggatccccagagcgtgcatcgcctccgacgccagactttcccggatcgtcgagcgcagcacggcgcggccgtcccccatccgcgaataaggagtcaggccggcgcctttcagatgccagtcgtaacggcggccatccgccagctgctgctcgccgagcaggatcccgcgtccgtcgcccagctggccggcccaggcgccaaactgatggccgctatatacctgcgccagcggcgacatgcccggaagcagcgcttcgccgccccagacaccggccccgctttcaggcgcaaacagggcgtcgggcacccccagctgttgcgccagcggggcgttgcgccagatgagtcgggcgttatccaacggcgttggtgacagggaagtgtaaaagtccggcagttcatcccgccagtgggtggtaaaagaaagggtcatggttcctcctctctccagtgtagtgcctggaacagcggattaacacgggcggagtgcagggttatcggcataaaaaagggaagcgttcgcttccctcttgcttctgaatgacgtcagattcgccgcgcctgccagaactttttgttccagtagacgttgtccagcgaggaacgggtgacgccctggctggtggaggcgtgaataaattggttgtcggtatcgtagatgccaacgtgcaggccgctctcccctgagccggttttgaagaacaccagatcgccgggcagcagatcgcgcttatcgatgcgggtgccgatttccgcctgctcgcgggtttcacgcggcagctggagggcaaatttatcgcgaaacgtgcgcaccacgaagccggagcagtcaacgccgcgcggcgtcatgccgccgtagcgatacggcgcgccgcgccagctgcgcagctgctcgttcagattcgccaccaccgtaatggagtctgccagccgaggattcggcggcggtgcccgatggctgctgcagccggctaaaattaacgccgccgccaacatgaaccagaagcgcatttcagatgatccctctgtccctagtctctttatcgcaataatttagcttgtttatcaataaagtgacaagataactgcgtgctactgtgacgcgatgagcataatatgaccggccacctcaacgcgctggaacgggatcgcataggcagcggttaaattttcctcattcagcacctcggcggtctccccgcaggcgatggcttccccctggcagagcagccagctctgaccggcgtggcgcagggtatggttgagatcgtggctgctcatcaccaccgcaatccccgcagcgctcagctcgtgtaacagccgatccagcgccgcctgctgggccacatccagactgttcatcggctcatccagcagcagcagctgacccgcggaattactcaagggatcgatctgcaggatcactgccgccagccgcacgcgctgccactcgccgcccgacagctgattgaccggacggcccagcttattgtccagaccaagcctggccgcgatatcgctcagacgggcgctatcaccctgctgctgcatatgcagcgccaggtagtgccataccggcatggcgaacggcggggtctggtgttgacacagatatccgcgacggcgcgccagctccctcgccggccactcgtcaagcagccggccgttaaaatgaaccgtgccggggccgtcggacagccccgccatgcgggtcagcagcgtgctcttccctgcgccgttcggccccaccagatggacaatctccccggcgcgaaaggccgcagaaaacggggccaggcgccccgccgcttctacatcctgtagctgcatcagaaacgacattattgcgccagcgctcctttaatcgccgccaccagctgcggatcgtccggcgtcatatccggagagaagcgctgaatgacgttgccctggcgatcgacgaggaatttttcgaagttccacagaatgtcgtccacatacagcggtgcccggcctttgctggccatccgctcataaaaaccgctgccttccggggccaccgctttcggcgcggcggcaatcagtttttgatagagcggcgcgcgatgttcaccgttgacgtcaattttgctaaacagcgggaaggtgacgccgtaggtagtgctgcagaaggtcttaatctcctcttcactgcccggctcctggccgaggaactggttgcaggggaaccccagcacgctgaagccctcggcggcaaactgcttttgtagatcctcgagttgctcatactgcggcgtcaggccgcatttcgaggctacattgacgatcagcagcaccttgccggcaaaggatgccagggtggttttctcgccatcaatggtcgtcacttcggtattcagaatgtcatgttgcatagcctgtcctcaatggataaaccggtttccggtgaaggtgatccctttctactgtagcggattcagcgcccgccattctactgccattccccccgagttgtcgcatgatgtaacagcgcttcgctggccgccggcaacatgaaatcctctcaattgggccgtcgaccatttccgtgtacagtgttccatgaatgtaatatggtttcgttaattgttaatttaagagagttttagtgatgaagaagttgtttagcctggcgttaatcgccacctctgtcgccctgctgagcgcctgctccccggatgaagataataaagtaaaagtcgctatcaataccgggccggacgaagccatctggaaagtggtggagcaggtggcgaaggataaataccacctcgacgtcgaagtggtctccttcaatgattatgtgctgcccaacgaagcgctgaacaacaaagatgtcgatgccaacgccttccagaccctgccgtaccttgaggcgcagtcgaaagaacgcggctataaatttgcggtggtcggtaaaacctttgtcttccctatcgccgcctattctcaccggatcaaaaatataagcgaactgcccgaaggggcgacggtgaccatctctaatgaaaccaccaccctgggccgcagcctgctgctgcttcaggcgcaggggttactcaagctgaaaccgggcgtcggctatttacccaccacgctggatatcatcgacaatccgaaacagctgaaaattgttgaagtggataccccgcagctgacccgtacccttgacgatccgaacgtcagcctgtcaatcattaacaccaacttctccgcccaggcgggcctgtcggccgcccgcgacggtctgtttatggaggggccggattccccatacgtgaatgcgatagtcgcccgcgaggataataaggacagcaagaaaattcaggaattaaaagccgccttccagaccagcgaagtcgcggaaaaagcgaaggaagtctacaaaggcgacgcgatcaaaggctggtaagcctgaaccggcgccgtccctgccgacggcgccgcgctatccccgcccccgcgaacgcagcagcaaccagataaagaccggcgcgcccagggtcgccgtcaccacgccaatcggcagctctgcggcggaaagcgccagccgggcaatgatatccgcccccagcaaggcgcttgccccggccagcatacaggccgggagcaacacccggtgatcgctcaagccgcatagccgcagaatatgcgggatcaccagaccgataaagccaatcgcccccgccagcgccacgctaacgccgaccatccagccggtcgccaccaccagtaatttgcgccacagccacagcggcagcccaagctgacgagcggagacttcgcccagcgccagtaaattcaggggttgcgactgcagacagacccagcagagcaccggcaggagggctatcatcagccacagctgttgccagtcgacgccgccaaacccgcccatcatccagtacattagctgacgcaggtcaaaagaggtggagaagtagactgcccaggtcatcagggcgctgcagatgatccccagcgccacccccgccagcagcagacggctggtagacagatggcggcgggcgaaacgcagcagaataaaagtgatcagcagcgcgccaaagatggcacacaggccgagcgcccagccgggcaagactcctttgcccagcaggacggcggcaatcagcccgacgcccgcgccgttggagacccccagcagccccggctccgccagcggattttcaaacaacgcctgcataatcgccccggagagcgccagcgccgcccccaccagcagcaccgccagggttcgcggcaggcggatctgccagataaacagctgacctttggcgctgagccactcgccgggcgggatccattgctcccccgcgcacaggctgatcagcagggtgaccagcagcaacagcgttaatccgaagagccaacgccggctgcggcgctgttgaagatgggcgagagtcagcatagattccattacgcagtgggaacaagaggctgattttacggtggctgtcgcggtgagaaaaggaaaacctcacgaccaaacgtcgacgcggaggaggctcccccgcgtcgaccatcccgctttacaccagaatctgaaacagcagcgcaaagagaatgatgttcgccaccacgattgcccagccgttatagagcatatatttcagatgagtagactgcgccagccccatctggccgaacatatctgatgagggaaacggcccgaaccagtccacctgggatgaggccagcagcacggcggtggtcccctggggcggcacgccggcggccatcagcatcgggccaaagattttatgagtaaaggtcatctgggccaccgccgcaccgggcacatggccgataatattgaacgcgaagatgctaaagcacagccaggccggggagatcccctccagcagcggttgggtatactccagcagcccctgataggcgtgcaggccatccatcagctcaaggatcgggttgtacagccagtagagaataaacatccacaccagacggccgcagccgtgatacagggcctgaaggatctgcgtcggtcgcaggccgcctaccaggccggtcatcagggccaccagcaacatcacgattatcgcgaagctgaagccggctttaatcaccacgccaacgatcgccatcacgatgatggtcgccgcgaaggccagcgcgcttaatttacgccgacgctgctgcgcggcgctgagatcctcttgcggcttttccgcgagatcgacgtcatagcgcagtttgccttcggtcatcttctggatccgtcccgccattacccagccggccagcagcgtgaccgcgctcatcggcagaccaacgtacagcagatagtccggatagctcaacccaccgaggctgaggatcgtcacggtgctgggggtgaaaggcccggtaaacagcccaacggaaccggcggtcatcatcagcgcggcgaccgttggcggcgtcaagcgtaccgctgccgccaccggaatgattactgccacgataatggcattgccaccggccatagtgcccagcgaaccgcaaattaaaatcgatgacgccacaatgccgaatttcacccgcgtctgactcgacaacccgatgcgatggacgacaaattttaccagctcaaccgctgcgccggtgcgggtggccacttcccccacgccggcgccgagcataatgataagcccaacggtggcaataaatgacccggtggatttcgccagcatcgtgcccatttccggcaggccggtcgaggtcattatcatggcgataataatcgaggagatgaccgccagcacaatatcaacgccgatcagcgataatatcgctagcgccaccagcggcgtaaatcccagcaggccaagctcactgcctggtcgaccgtggcaccacagcgcgatcaacacgaacagcagcaataacagaccaataataacgtttttccgcgtgatatttcgtctgacaggcgcattgcctgtgagcgttgagtcactcataacactccttaatgccaatcaatccgaccatgatggtcagatggtgtatgggggcctgctcagaaaatatcctccctctttttcattattgattggccgcggcctgagggtttgtttgggtacaaaggaaacgattctgagagcgtaatatgccgccattgggcggggtctacagcacaagatgtaaccaatgcgctgattggtgattaaatctatgttaacttagtgttagtagaaaatgactttttatcggtaggctataaccctgagttaactgttcatgaaactgcgtcatctggaaatcttctatgccgtcatgacctgcggctctttatcgcgggcggcggaagcgctcaatatctcccagcccgcggccagcaaagcgttaaaaagcgccgaaatgaagctgggttttaccctgtttcagcgggtgcgcggcaagctactgccgaccagcgaggcgatcacacttttcgaaaaagcgcagagcatttatcaggacctggacaacctgcgcctgctggccgacaacctggctcgcgatccgcgcgccaagatcactttaggctgtctgccaagcctggggttaagcctggtgccggagctggtgaccgacttttatcagcaaaacagcaacctggtgatgacgctcactaccgagcacaccgagacgctggtcaaaaaactggatttgcgcgagatagatttggcgctgacgctacagccggtgcagcagggggagatcctgaccaccctgattgccgaagtaccgctggtgtacatcgaccgtcattatcgtcagggggcggtggagatcgatcagatcgaccagcagcgctggatctcgccgggaccgcactcgctctctgccgccatcgccacccgtcgcgacttttccaccacccggctaaacgtccagacctactatatggccaccgagttcgtgaagcgcggcatgggctgcagcatcactgatatcttctccgcccagcacaatctggccccggagatgatccatcccattacgccgccgatggcgattaacctctgtctgttacgccgggccgacgtttccctgagcccgatggcgcaaaagttcgtcgattttctctgccagcgtctgcgccagcagctcaaggagattaacctgcggttataccctgaccataaaaagtcaattgcgccgctggggtaaatgctttgacataacccgataaatttatcagcggtggatatatcgggttatgaacaaacgcattgtcattatcggcggcggcgtggtcggtctggccacggcatgggaactgatcaagcgcggccatcaggtgcaattactggagcgcaatgccgaaccgggcagcgccaccagttttgccaacggcggacaattaagttaccgctacgtcgccccccttgccgacagcggcgttcccctgcagggaatgaaatggatgggcaaagccgattcgccgctgaatatgcgtctcaggatgtctctccagcagtggcgctggctgctgcagtttctgcgcgcctgtaataaccagaccaataaaatgaatggcgaccatattttacgcctgtcgctgctcagccgtcaggtcatgcaggcgtggcgggatgaggataatcttgccgatttccactggcggcgcagcggaaaattaattatccatcgtcgcgaatatgattttaataaagcagcaaaagggattgatcctcagtatcagcaggcgctgaatgctgaagcctgcctgcagctggagccggcgctcaaacatattagtccttctctgcagggcggaatctattcgccaggcgatgaaacggcagattgtcatcagttctgccttgccctgctcgacaagctcaatgccagcagcgactttagcctgctgacccagtgtgaggtgcggcgactccataagcgcgggggacgcatcagcagcctggagaccagtcaggggaccctcaccggcgatgagtatgtcgtcgccgccggtaacggcagtggttctctgcttgggcatctgggggttcgcgtgccgctgtgcgccctgaaggggtacagcctgaccctgccctatcctgaaaaagcaggtattgcccctgacatcagcgtcaccgactacgggcacaaaatcgtttatgcccgccttggccaacagctgcgtatcgcggcgatggtggacatcggctacgacggcgacgaactgcgcgaaagccgcattcaggcgctgaaaaacatcgtcgcccgcagctttcctgaactggaggggctggacgaggccgaagtctggaccggcatgcgcccgtcaacgccagccggcccgccgatgctggggcgcgccggctaccccaacctgtggatgaacctcggccagggtagcctcggctttactctcgccgccggcagcgcggtggtgctgggcgcgttaatcgacaatcagatgccagacatttctttagaaggtctcacatggaaacaaaccgcatgacaattattcgtaataatccacaacctcgtcttgccgccagcgttgcgtatggcgatctgctgttcctctccgggcagacgccaaaaagcaatgaagacgatatcgttttacaaacccgtgaagtactggagaagatcgacgcgctgctggccgcagccgggagcgataagcagcacattctctccgcgcagatctggttgaaaaatatcgagcgtgactttgccgcattcaatgaggtgtgggtgcaatggatgccggaaggctatagcccggcgcgagcggccgtgcaggcggagatggcgcgaccagaaatcctggtggagatcatgctcaccgccgtcaaagcgtaaagattgacagaaaagaaaaaggccgcaatgcggcctttttaattagttcagattatttgtctttcggcgacgcgttttcgacacggcttttcagcttctgaccgggtctgaaggtcaccacgcgccgggctgtaatgggaatatcctcccccgtcttcgggttacgtcccgggcgttggtttttatcccgcaaatcgaagttgccgaacccggagagtttgacctgttctccgttttccagagcacgacggatctcttcgaaaaacaactcgaccagttctttggcatcccgcttgctaagcccaagcttatcaaacagatattctgacatttcagcttttgtaagcgccataggttcaatccctcaatgatgcctggaatcgctcttttaatgcctctacacatctggcaacggtagcggcaatctcctcttcttcgagtgtacggctggtatcctgcaggatcaggctaatcgcaaggctcttatacccttccgccacacccttaccacggtacacgtcaaataagtttacgccaactacctgatttacgccaactttcttacattcggctaaaacatcggcggcagccacgttttccgcgaccagcaccgcgatgtcgcgacggttcgccgggaagcgggaaatatcgcgcgcctgaggcaccacgcggtctgcgagcttgttccactccagttcgaacaccagagtgcgaccgttcagatccagtttacgttccagctcaggatgaacaaccccaatgaaaccaatgcgttcacctttaagataaatcgctgcggattgtcccggatgcagcgcggtggtcgcttcagcacggaattcgatatccgctaattttccggttaaatccagaacggcttccagatcgcctttcagatcatagaaatcgaccgtctctttcgccagtgtccagtgctcttcgtagcggttgccgcagatcgccccggccagcatcacatcctgacgaatgcccagcggcgcattggtgtccggcacaaagcgcaggccgctctcaaagatgcgcacccggctctgctgacggttctggttgtagaccacggtgcccagcaggccggtccacagcgacaggcgcatcgccgacatttcgctggagatcgggcttggcaggatcagcgcctcttccccggcgtggatcagctgctggactttcgggtcgacgaagctgtaggtgagcacttcctgatagcctttgtcgttcagcagcgttttcacgcgcttcagcgacaggtccgcttcgcggtgggttcccatgatcagacccgcctgcaccggctcgtcaggaatgttgttgtagccgtaaacgcgagccacttcttcaaccagatcttcttcgatctccatgtcgaaacgccagctcggcgcaaccgcctgccattcgccctcgccaaccgtcacttcgcagccgaggcgctgcagaatgtcggtgacctgcgcgtcagcgatatggtggccaatcaggcgatccagcttgctgcgacgcagcgtaatggtggcgcgtgttggtagattctctttgctggtaacgtcaatgaccgggccggcttcaccgccgcagaggtcgatcagcagacgggttgcacgctccagcgctttatactgcagggccggatcgacgccgcgttcatagcggtgagaggcatcggtgtgcaggccatgacggcgcgcgcggccggtaatggacagcgggctgaagaacgcgcattccagcagcacgttctgggtttcgtcgttaacgccggagtgttccccgccgaagatcccccccatcgccagcgctttgttatggtctgcaatgaccagcgtatcgctgtcgagctttgcttcagagccatcgagcaggaccagggtttccccttctttcgccatgcgcaccacgatcccgccttcaatacggtcgcggtcaaaggcgtgcatcggctggcccagctcaagcagcacatagttggtcacgtcaaccaccgcgtcgatggagcggatcccgcagcggcgcagcttctctttcatccacagcggcgtcggcgctttgacgttgatacctttcaccacgcgccccagatagcgcgggcaagcctgcggcgcgtcaacctgaatcggcagcacgtcgtcaatcgtcgcggcaaccggcgtgatttccggcgcgttcagcggcgctttgttcaggacagcgacatcgcgcgccacgccaatgatgcccaggcagtcggcgcggtttggcgtgacgctgatttcgatggtgttatcgtcaagcttgaggtattcgcgaatatcggtgccgatgggcgcatctgccggcagctcgatgataccgctatggtcgtcggaaatacccagctcggagaaggagcacagcatcccctcagacggctcgccgcgcagcttcgcggccttgattttgaaatcgcccggcagcacggcgccgatggtggctaccgcgacctttagcccctgacggcagtttggcgcgccgcagacgatgtccagcgggccgtcgccgccgacgttgactttggtgacgcgcagtttgtcggcgttcgggtgctgaccgcactccaccacttccccgactacgacgccgttgaagctgccggcgaccggctcaacgccatctacttcgaggcccgccatggtgatctgatcggaaagcgcttcgctgtcgatcgccgggttaacccattcgcgtaaccacagttcactgaatttcattgttctgtcctgcccttatttaaactgtttgaggaaacgcagatcgttttcgaagaacgcgcgcagatcggtgacgccatagcgcagcatggtcagacgctccatgcccatgccgaaggcgaagccggagtagacttccggatcgatacccacgttacgcagcacgttcgggtgcaccatcccgcagcccagcacttccagccatttgccgtttttacccatcacgtcaacttccgcagacggttcggtgaacgggaagtaggacggacggaagcggacctgcagatcttcttcaaagaagttgttcaggaagtcgtgcagcgtccctttcaggttggtgaagctgatatttttatcaacgatcagaccttccatctgatggaacatcggggtgtgggtctgatcgtagtcgttacgatagacgcggcccggcgcgataatacggataggcggctgctggttttccatggtgcggatctgcacgccggaggtctgcgtacgcagcaggcgagtggcatcgaaccagaaagtgtcgtggtcagcgcgcgccggatggtgacccggaatattcagcgcatcgaagttgtggtaatcgtcttcgatttccgggcccgtcgccacggtaaagccgagctcaccgaagaaactttcaatacggtcgatggtgcgagtaaccggatgcaggccgccgttttcaatgcggcgacccggcagcgagacgtcaatggtctctgcggccagacgcgcattcagcgctgcgccttccagttcagctttacgcgcgttcagcgcctgctgcacctgctctttcgcctcgttgatgaccgcaccggctgccggacgctcttccggcggcagctcacgcagggtggtcatttgcagggtcagatgcccttttttacccaggtattccacgcggacgttgtccagcgcagcaacatctgatgcctcgttaatggctgccttggcactggcaaccagctctgcgagatgtgacatggttttcctcattatgtcggtgcagacaccggttatagtgaaattaatattccgaatccatatacgaaaaaagcctccacaggggaggctttctggcgctgttttccgtttcttctttcacgcgcaagccccctgagttcaggtgctaaagtaaaaaaagaagcggaaaatagcagcattcatgcttgcattaccttgtctggtaagaaacgtcagagctgtattgaaaagcctgcgccgataaaagtcaatgtattgatggtgttgaaacgaaaagagggagacaagctccctctttcaactggcttatgccagagctgctttcgctttttcgaccagagcggtgaacgctactttgtcgaatacagcgatgtcagccaggatcttacggtcgatttcaacagaggcttttttcaggccattgatgaatttgctgtaagaaataccgttctgacgtgctgctgcgttgatacgtgcaatccacagttgacggaactgacgtttacgttgacgacggtcacggtaagcgtactgaccagctttgataacagcctggaaggcaacgcggtatacgcgagaacgcgcaccgtagtagcctttagcttgtttcaaaattttcttgtgacgtgcacgtgcaattacaccacgttttacgcgagccatgtgtgctctcctgtatctattctaagttaaaaaagttaaacgttaacgacttatgcgtacggcaggcacgcgataaccaggcccagatcgcctttggaaaccatggctttcggacgcaggtgaagtttacgcttggtagcttttttagtcagaatgtgacgcaggttagcgtgcttgtgcttaaaaccacctttaccggtttttttgaagcgcttagcagcaccgcgtacggtcttaatttttggcattttaataacttccacttcgcattgttaataaacgaaacaaaggcgaacaaaaccagtgagccgaagcccaccggaaatgtttcttgatggccttactgtttcttcttaggagcgagcaccatgatcatctggcggccttcgatcttcgttgggaaggattcgactactgccagttcaaccagatcgtctttcacgcggttaagcacttccataccgatctgctggtgggccatctcacgaccgcggaaacgcagcgtgatcttggccttatcgccatcttcgagaaagcgaatcaggctgcggagttttacctgatagtcaccttcatcagtaccagggcggaatttaatttccttaacctggataactttctgcttcttcttctgttccttagaagacttactcttttcataaaggaacttgccgtagtccatgatacgacaaactggcggctcggcgttagggctgatttcaactaaatctactccagcctcttcagccttttcgatagcttctctcagactcacaattcccagctgctcaccttccagacctgttaagcgaacttcctgggcgcgaatctcgccattaatacgattcggacgtgccgtttgaactcgttttccgcctttaataccttattcctccagttgttgaagactgcggctgcgaatctcttgttgcagcttctcgatcacttcatttacgtccatgctgccgaggtctttcccgcgacgggtgcgcacggccactttgccggcttcgacttctttgtcgccacagaccaacatatacgggacacgacgtaaagtgtgctcgcggattttaaagccaatcttctcatttctcaagtctgcttttacacgaatgcccgcattttgtagtttacgcgtcaattcgttaacgtattcagcctgagaatcggtaatattcatgaccactacctgcactggtgcaatccaggttgggaagaagcctgcgaactcttcggtcaggatgccaatgaagcgctccagagaaccgagaatcgcacggtgaatcatgaccggcacctgacgctcgttgttttcgcccacataggaggcgcttaaacgctgcggcagagagaagtccagctgtacggtaccgcactgccatgcacgatcgaggcagtcatacagggtaaattcaattttcgggccgtagaacgccccttcacccagttgatattcaaatgggatgttattttcttccagcgccaccgccagatccgcttccgcgcgatcccaggtctcgtcgctaccgatacgtttttccgggcgagtcgacagtttgacgacgatcttctcgaagccaaaggtgctatacatatcgtagaccatacgaatacaggcgttcacttcatcgcgaacctgatcttcagtacagaagatatgcgcatcatcctgggtaaagccgcgaacgcgcatcagaccatgcagcgcgccagacggttcgttacggtggcagctaccgaattccgccatacgcagcggcaggtcgcggtaggatttcagcccctggttgaagatctgcacgtgacccgggcagttcatcggcttgatacagtattcacggttctcagaagaggtggtgaacatcgcatctttgtagttgtcccagtggccggttttttcccacagcacacggtccatcatgaacggaccttttacttcctgatactggtactctttcagtttagaacgaacaaacgtttccagttcacggaagatggtccagccgtcattgtgccagaacaccatccccggcgcctcttcctgcatgtgatacaggtcgagctgcttaccgattttacggtggtcacgcttggcggcttcttccagacgctgcaggtaggcattcagcgcttttttatctgcccacgcggtgccgtagatacgctgcaacattttattgttgctgtcgccgcgccagtaggctccggcggttttcatcagcttaaagtgatggcagaagcgcatgttcggtacgtgcggaccgcggcacatatcgatatattcttcatgatgatacaggccaggcttgtcatcatgggcaatgttttcatcaagaatagaaactttatagctttcgccgcgtttcacgaaggtttcacgcgcttcatgccagctcactttcttcttgataacgtcgtagtttttctcggcgagctcatgcatacgtttttcgagcgcgtcgatatcttcctgggtcagggtgtggtcgaggtctacgtcatagtagaaaccattatcgacaaccggaccgatagccattttggtgttgggccacagctgtttgatggcatggcctaacaggtgcgcgcaggagtgacgaatgatctccagcccttcttcatctttcgcggtgatgatagagagagtggaatcggattcgatcgggtcacaggcgtctaccagttcaccgtttacccgcccggcaatggtggctttcgccaggcctggaccgatatccagcgcgacatccatcggactaactgcgtggtcaaaatggcgttggctgccatcaggaagcgtaattacaggcattttatgtccttatttgcagtggtgccccgcacgaaagagcacatacaaaactatataatcataattatcatcaggttaaggcgcagttcccgcttcactctgcgaaaataggagcacgaccggaacgatcgctcccccctgcagccgcctgctgataacaccggggagtagtttacacatcattggtacgtgattaaagccgcaacagcataaatgatggcggaatgcggagaaaacaagaggtccacggataaaaagcagaatataagcgatgtggcgcggtaatattggccaatggcgccggacgatattattcggatatgataaaagagacgtggagatattgcctgctgaatgtataccgcgggccattaaaccggtaccacttaacccggcttattagaccgctcgcgaaacgatagcctgcaatattaagaccactcgccggcaaccagcgtatgcacattaaaggcgtcgttcatggattttccggtggtaggggcgccgggcgcaatattcgaaccagcctcaacgtcagaggctttggcgatacctacctgggtatgatcctgatgacccgatggcggaacgggcgtggcggctgatgcgccaaaagaaagcacgcacagcgccagggctgcgatggtataacgattgtttttcatgatgttaattctcttattacggaaaacagaccgggcaatgtcgccctccggtcagtggttgttagtatagatccagatcacatatttgtccgtcgaatatttagctatttgtgtcaaatagaatgaatatttgtcaggcgctcgtgaataatggagaaaaaatggagggctatttcctttttacaaaaagtaaaacgaacggccagaaaaaataatatcactaattgctaaaaccaaaacgaacaggccggggaaaacccggcctgaaatattacatcttatacccgagggagagcgaggtccggcgatcggtatgctccggcgcggacgcaggcggctcagagttccaggtcacgttgtaggcgaccttcagggcgaaatgggcgttaatcgccacgtttaacgcgctctctgagttgaccgtggtgtcctcggcgccgaacaccgataccccttgcgaaaatttggcgttatcggtcatctgccaggcccaggtacccgaagcataacccagcggttgggtatcagtatccccgtcggtatattcgtcatagcgaacgccaggaccgaattcaaaccgcagactgtgcaccggcccgttgaggatctgacgaccatagcccgccgtcacaacatcgcgctgttgatagccgttgtagcggtcagttagccagctaccctgaccaaaaacatagttcatatcggtcaggttgtagcggctacgtccgccgactgcatatttttctgaggatcgctcatcattggacgacgtgttgctggcgttgccccacagcgaccaggcggtggtattaccataccaggtcagggtggaatccgccgtcatcgaagagctcttggtgttgccggactgcgccaggtagcctgcgttaaccaccccttcgaacggttttttggcagcggaagggtcatccatgacggtaaatacagaatcatcggccattgcgccaacagacgcaaaaagcccccccgccagcataaccgctgcgggtactgtctttaaaagcttcattataactctctaaaatacatttttttaggacagtacaaatgatgaacaggcataatctcgccggctcattgaatttagcgtccgtacaacataaaagagacctgagggtcccggaaactttcgcgaggatcgcggagtgcaggtcctaagaaaggtagcaaattataaaaaagcacgaataacatagcaatcacttactctttcgttttttgaataagacagctccggaaacaatctttatttcataatgaaaatagaggcatctttgcaaaactgtcaggaactggactttccctccccgagtcatcgtgccatgcttaaaataacgacagtcgccgtattaaggcttgctcttatacacatctgacactgccgacgagcgagctagtgtagatagcggtggacgacgtaacactaaacaaaaaaacatagagataaacaaaaacacacgtgacaaaaaataaataaaactcacagacatttataacacagccatacataataataac

SEQ ID NO: 188 - DNA, 23564 bp, Unknown
  source: /note="Description of Unknown: MKP2_2161_1 Mutant Bacteria sequence"
ggtaccggcagtcgtctctggccgatgtctcgcgagctttacccgaaacagttcctccgcctgttcgggcagaactccatgctgcaggaaaccatcacccgactctcgggccttgaaatccatgaaccgatggtcatctgtaacgaagagcaccgcttcctggtggccgaacagttgcgccagctcaacaagctgtccagcaacattattcttgagccggtcgggcgcaacaccgccccggccatcgccctggcggccctccaggccacccgccacggcgacgacccgctgatgctggtcctcgccgccgaccatatcatcaataaccagccggtcttccacgacgccatccgcgtcgccgagcagtatgccgatgaaggccatctggtcaccttcggtatcgtgccgaatgccccggaaaccggctacggctacatccagcgcggcgtggccctcaccgacagcgcccatactccgtaccaggtggcccgtttcgtggagaaaccggaccgcgagcgcgccgaggcctacctcgcctccggggagtattactggaacagcggcatgtttatgttccgcgccaaaaaatacctctccgagctggccaaattccgcccggatatcctcgaagcctgccaggccgcggtcaatgccgccgataacggcagcgacttcatcagcatcccgcatgacattttctgtgagtgcccggacgagtccgtggactacgcggtgatggagaaaaccgccgacgcggtggtggtcggtctcgatgccgactggagcgacgtcggctcctggtccgccctgtgggaggtcagcccgaaagatgagcagggtaacgtcctcagcggcgacgcgtgggtgcacaacagcgaaaactgctacatcaacagcgacgagaagctggtggcggctatcggcgtggagaacctggtgattgtcagcaccaaggacgctgtgctggtgatgaaccgcgagcgttcccaggacgtgaagaaggcggtcgagttcctcaagcagaaccagcgcagcgagtacaagcgccaccgcgagatttaccgtccctggggccgctgcgacgtggtggtccagaccccgcgcttcaacgtcaaccgcattacggtgaaaccgggcggcgccttctcgatgcagatgcaccaccaccgcgccgagcactgggtcattctcgccggcaccggccaggtgacggtcaacggcaagcagttcctgctgaccgagaaccagtccacttttattccgattggcgccgagcacagcctggaaaacccgggccgcattccgctggaagtgctggagatccagtcggggtcgtacctcggcgaggacgacattattcgtattaaagaccagtatggtcgttgctaattttttcgggacaaaacgcagaatgacacagttaacatgctttaaggcttatgacatccgtggtgaactgggcgaggagctgaacgaggacatcgcctaccgtatcggccgcgcctacggcgaatttctgaaacccgggaagatagtggtggggggcgatgtgcgcctcaccagcgagtcgctgaagctggcgctggcccgcgggctgatggacgccggcaccgacgtgctggatatcggcctgagcggcacggaagagatttacttcgccactttccacctcggggtggacggcggcatcgaggtgacggcgagccataacccgatgaactacaacggcatgaagctggtgcgcgagaacgcgaagcccatcagcggcgacaccggcctgcgggatatccagcgcctggcggaggagaaccagtttccgccggtggacccggcgcgtcgcgggaccctgcgtcagatatcggtgctgaaggagtacgtcgaccacctgatgggctatgtggacctggcgaactttacccgtccgctgaagctggtggtgaactccggcaacggggcggcggggcacgtgattgatgaagtggagaaacgcttcgcggcggccggggcgccggtgacctttatcaaggtgcatcaccagccggacggccatttcccgaacggtatcccgaacccgctgctgccggagtgccgccaggacaccgccgacgcggtgcgtacgcatcaggcggacatggggatcgcctttgacggcgacttcgaccgctgtttcctgttcgatgacgaggcgtcgtttatcgaggggtactacattgtcggcctgctggcggaggcgttcctgcagaagcagccgggggcgaaaatcattcacgacccgcgtctgacgtggaacacggtggacatcgtgacccgcagcggcggccagccggtgatgtcgaagacggggcatgcgttcatcaaggagcggatgcgccaggaagacgccatctacggcggggagatgagcgcgcaccattacttccgcgacttcgcctactgcgacagcgggatgatcccgtggctgctggtggcggagctgctgtgcctgaagaacagctcgctgaaatcgctggtggcggaccgccaggcggcgttcccggcgtcgggggagatcaaccgcaagctgggaaatgcggcggaggcgatagcacgcatccgggcggagtatgagccggcggccgcacacatcgacacaacggacggtatcagtattgaataccctgagtggcgctttaacctgcgcacgtccaacacggagccggtggtgcgtctgaacgttgagtccagagcggatacggcgttaatgaatgcaaaaaccgaagagattttagccctcctcaagtaatgcattaaccataacggaagccatagggtcagattttaatcgtatttttgaccttatggcttattcttgacatcccacaggtcaaagcgtaaaaccgcccacagcattattaaaattcgtggctatccgccattacccagttaactgattaaagtgtaatcgaatgaaaattactatttccggtacaggttatgttggtttatcgaacggtatcctgattgcgcaaaaccacgaagtggtggccctggatatcgtacaggccaaagtggatatgcttaaccagaagatctctccgattgtggataaagagattcaggaatatctggcagaaaaaccgttaaatttccgtgccaccacggacaagcacgacgcctatcgtaatgccgactacgtgatcattgcgacgccgaccgattatgatcccaaaactaactacttcaacacctctacggtggaagcggttattcgcgatgtcacagagatcaacccgaacgcggtaatgatcattaaatcgaccatcccggtggggttcacccgcgacattaaagaacgtttagggattgataatgttattttctctcctgagttcctgcgtgaaggccgtgcgctgtacgacaacctgcacccgtcgcgtattgtcatcggtgagcgctctgcgcgtgccgaacgttttgctgatctgctgaaagaaggcgcgatcaagcaggatatcccaaccctgtttaccgactccaccgaagcggaagcgatcaaactgttcgctaacacctatctggcgctacgcgttgcctatttcaacgagcttgacagctatgctgaaagccaggggctgaacagcaagcagattatcgaaggggtatgcctggatccgcgtatcggcaaccattataacaacccgtcctttggctacggcggctactgtctgccgaaagataccaagcagctgctggcgaactacgaatcggtcccgaacaatatcatcgcggctatcgtcgatgccaaccgtacccgtaaagactttatcgcggattctattctcgctcgtaagccgaaagtggtgggtgtatatcgcctgatcatgaagagtggttcggacaacttccgtgcctcttctattcagggcattatgaagcgcatcaaggcgaaaggtattccggttattatctatgaaccggtgatgcaggaagatgagttcttcaactcccgcgtcgtgcgcgacctggatgccttcaaacaagaggcggatgtgatcatctctaaccgtatggcggaagagctggcggatgtcgcagataaggtttatacccgcgatctgtttggtaacgattaattctgcctgtctgacactggcggttccctgccgccagtgttcttctttatctccccgctatatctctcactacgcgtatttctcgcacattcagattaacctcaataaattgtgatggacattacgatcctgcgcaaaagccgttgcgggttgaaaacaggtccgataagttaaacttaccttgtgaagagctaccgtcactgtgatgtagatgccggagataagcgccgggaggtaaaacaaagcctgcaacgcaggcttttgttatttatgtcctatgaaaaaacgcggaatagggcgcgagtagcgttattttttttcttgccttaaggccatgccaaaacgcagaatgaatagtcattctgtcatatcatttttttatctcttaatattatcttaatctaattgtaatacggaacgggccttaccacttgcgtttattaaacgtcagtttcgttttctttctgtcttttaaataagaaattaagaaataaacggaaacagcaagtagtatggcagcgaccactaagaaaaataggttttccataatatctaccacagggcgtatgttgattgaattattagcttgataagcaatacatcagttttgtgctgttgcatggcttgctctaacatatcctggatttaggaaaattcctacagatagtaatgttttttatcaatcagcatataatgctgtttccgctaaccaaattggtctggataccagaaaagtttcagtgcctggtgcgcggatatttgcttttctgaaaaaggctggatgaaactggtctcaggcgggcgagtaaaaaggcaaaaatggcgtctatagcacaaaatattatataaaaaataatgaatgtgcattccgtcgacatatagtcaggataacggaggttacattgaaggggttgccgcaatcagacgattgcggcagggcagggggattagatctgatagtaatccttgtaccactccacgaagttcttcacgccgtccttcactgacgtttgcggcttaaagcccaccaggtcatacagcggttgggtgtctgcgctggtgtccagcacatctcccggctggatcggcatcatattcttctgcgcttccattcccagcgcctcttccagggcagtgatgtagtccatcagttccactggtgagctgttgccaatgttatataccctgtatggcgcggagctggtggccggggaaccgctctcaacggtccagtcggcattggcctgcgggatcacatcctgcacccgaaccaccgcctcgacgatgtcgtcgatataggtgaagtcgcgcttcattttgccgtagttgtaaacgtcgatactttttccttccagcatcgctttcgtgaacttgaacagcgccatatccgggcgaccccacggaccataaaccgtaaagaagcgcagcccggtggtcgggatgccgtacagatgggaataggtatgcgccatcagctcattggctttcttggtggcggcatacagggagaccggatggtcgacggaatcttcggtggagaacggcattttacggttaaggccgtaaaccgagctggaggaggcgtacaccaggtgtttcaccttggtatgacggcagccttccagaatgttcagataccccatcaggttagcgtctgcgtaggcatacgggttttccagcgagtagcgcacaccggcctgggcggccaggtggatcacgcgatcaaattgctctgtggcgaacagctttgccataccttcacggtcggccagatccagctgctggaaatggaatgccggagatgccaggcgatccagacgggcctgcttcaggctgacgtcataatagtcgttcatgttgtcgattccgacaacatcatgcccttcattcagcaggcgctgcgcgatatggaagccgataaaacctgcggcaccagtgaccaaaaacttcatatttttcctccggggtgtggatatcccgttctacataagtgccgattttacactggcttgcggttgggatcacttgctttgccgcgtcttacccgccaggtgagaggtgaaggacgttttttctggcaaaactgcggtggcaaaggctgataaataacaacatttctcatttgactgttagcctccgaataataaccttgtgaccggtcggtggtttagcgattcgtggcgataccctaaaggcagccaataccctccgggacggcataattttgcttaaagttatatttttcgtcagcggaacatttagtaaatgggcaaaaatcgcgccatgctttcctccgttttgtcttttatatcattgacttattgttgttttgtttgtttaatgaatgtttaagatgtgtattatttgagtaatccattaatcagtaggcttttttatttttattcccggcgtccagcgctataatctgcggacgattttctttgtggaatgtgcattgtagagcatgagtcgtttatcccacctgtcggaacatagcgccgccgccgtgtgcaaagggccatcaagcctgaacgcgcgctgtctccctggcggcgaagacgatgtctcttcttctctttccccgcatcgtgaacgctcccttttgctgctggctcacatcggcgggtcgcccgtttctctttcatcagtggcgaaaagcgcagacgttataccctgcgtaaatgagaaagtcctgatggttaattcggcggcaaatgaggaaagtgtggtgcgtttggcggccaggtgaggaacagatgcatattaaaagcagagatatgtctcaaggcatatctctgcttttaggttttcaggccccccgttctgtcagactggcttttcaggccgctgagtgaacgatctgccgatagcctgaagcgaaagcgggtggcgtttagcctggagcacgggagcagtacgcattttggttgcgacagccaatggcggtagcgtgcctgaaaaaggccgttccacccagacggtcgattgattgatagtaaaataaagcaattatttatttaaggatttcattatgttacttcctgtaattatggctggtggtaccggcagtcgtctctggccgatgtctcgcgagctttacccgaaacagttcctccgcctgttcgggcagaactccatgctgcaggaaaccatcacccgactctcgggccttgaaatccatgaaccgatggtcatctgtaacgaagagcaccgcttcctggtggccgaacagctgcgccagctcaacaagctgtcgaacaacattattcttgagccggtcgggcgcaacaccgccccggccatcgccctggcggccctccaggccacccgccacggcgacgacccgctgatgctggtcctcgccgccgaccatatcatcaataaccagccggtcttccacgacgccatccgcgtcgccgctcagtatgcctatgaattccatctgttccccttcggtatcgtgctgaatgcccctgaaaccggctacgtctacatccagcgcggcgttgccctcaccgacagcgcccatactccgtaccaggttgcccgtttcgtggagaaaccggaccgcgagcgcgccgaggcctacctcgcctccggggagtattactggaacagcggcatgtttatgttccgcgccaaaaaatacctctccgagctggccaaattccgcccggatatcctcgaagcctgccaggccgcggtcaatgccgccgataacggcagcgacttcatcagcatcccgcatgacattttctgtgagtgcccggacgagtccgtggactacgcggtgatggagaaaaccgccgacgcggtggtggtcggtctcgatgccgactggagcgacgtcggctcctggtccgccctgtgggaggtcagcccgaaagatgagcagggtaacgtcctcagcggcgacgcgtgggtgcacaacagcgaaaactgctacatcaacagcgacgagaagctggtggcggctatcggcgtggagaacctggtgattgtcagcaccaaggacgctgtgctggtgatgaaccgcgagcgttcccaggacgtgaagaaggcggtcgagttcctcaagcagaaccagcgcagcgagtacaagcgccaccgcgagatttaccgtccctggggccgctgcgacgtggtggtccagaccccgcgcttcaacgtcaaccgcattacggtgaaaccgggcggcgccttctcgatgcagatgcaccaccaccgcgccgagcactgggtcattctcgccggcaccggccaggtgacggtcaacggcaagcagttcctgctgaccgagaaccagtccacttttattccgattggcgccgagcacagcctggaaaacccgggccgcattccgctggaagtgctggagatccagtcggggtcgtacctcggcgaggacgacattattcgtattaaagaccagtatggtcgttgctaattttttcgggacaaaacgcagaatgacacagttaacatgctttaaggcttatgacatccgtggtgaactgggcgaggagctgaacgaggacatcgcctaccgtatcggccgcgcctacggcgaatttctgaaacccgggaagatagtggtggggggcgatgtgcgcctcaccagcgagtcgctgaagctggcgctggcccgcgggctgatggacgccggcaccgacgtgctggatatcggcctgagcggcacggaagagatttacttcgccactttccacctcggggtggacggcggcatcgaggtgacggcgagccataacccgatgaactacaacggcatgaagctggtgcgcgagaacgcgaagcccatcagcggcgacaccggcctgcgggatatccagcgcctggcggaggagaaccagtttccgccggtggacccggcgcgtcgcgggaccctgcgtcagatatcggtgctgaaggagtacgtcgaccacctgatgggctatgtggacctggcgaactttacccgtccgctgaagctggtggtgaactccggcaacggggcggcggggcacgtgattgatgaagtggagaaacgcttcgcggcggccggggcgccggtgacctttatcaaggtgcatcaccagccggacggccatttcccgaacggtatcccgaacccgctgctgccggagtgccgccaggacaccgccgacgcggtgcgtacgcatcaggcggacatggggatcgcctttgacggcgacttcgaccgctgtttcctgttcgatgacgaggcgtcgtttatcgaggggtactacattgtcggcctgctggcggaggcgttcctgcagaagcagccgggggcgaaaatcattcacgacccgcgtctgacgtggaacacggtggacatcgtgacccgcagcggcggccagccggtgatgtcgaagacggggcatgcgttcatcaaggagcggatgcgccaggaagacgccatctacggcggggagatgagcgcgcaccattacttccgcgacttcgcctactgcgacagcgggatgatcccgtggctgctggtggcggagctgctgtgcctgaagaacagttcgctgaaatcgctggtggcggaccgccaggcggcgttcccggcgtcgggggagatcaaccgcaagctggggaatgcggcggaggcgatagcgcgcatccgggcgcagtatgagccggcggccgcacacatcgacacaacggacggtatcagtattgaataccctgagtggcgttttaacctgcgcacgtccaataccgagccggtggtgcgtctgaacgtggagtccagagcggatactgcgttaatgaatgagaaaaccgccgagctgctcaacctgttaaaagaggaatcgctttgagtcctatgttttcagcgatctatcgctaccgtggctttattattgacagcgtcaaacgggactttcagtcccgttaccagactagcttcttaggcgcggcatggctaatcttacagccgatcgccatgatttccgtctatacattaatcttttctgagttaatgcgtgcccgcctggcgggcatggacggcccttttgcctacagtatctacctctgttccggggtgttaacctgggggctgtttacggaaacgctcaatagtctggtcaacgtttttctgaccaacgccaacattcttaaaaagcttagctttccgcggatctgtttaccaatcatcgtcaccgcttcggcgttcattaacttcctgatcatttttggtctgttcgtgctgtttctgatcgttacgggcaatttcccgggcatgattttctttgaaatcattccggtgctgatcgttcagatgctgttcaccctcggcctcgggatcatcctcggggtgctgaacgtttttgtccgcgacgtcgggcagttcgtgaatatcctgctgcagttttggttctggtttacgcccattgtctacgtgtccaaaacgctgccggagtgggtctctggtctgctggcgtataacccgatggcgaccattatcggttcataccagaacgtgatgctctatcaccagagccctaactggctggcgctgcttccggtcacggtgctgtccgtcattctgtttttatttgcctggcgtttatttaaaaaacatgccgctgatattgtggacgagatttaatcatgagtatcaaagttcagcacgtcggcaaggcgtataaatattatccatccaaatggaaccgggtcattgagaaacttctgccgggcgataagccgcggcacagcaagaaatgggtattgaaagatatcaatttcagtattgaacccggtgaagcggtcggcattgttggggtgaacggcgcaggtaaaagtacgttactgaagctgctgaccggcaccactcagccgaccaaaggcagcattgagatccaggggcgtgtcgctgcgctgctggagctgggcatgggcttccatcctgactgtaccggtcggcagaacgtgtatatgtccgggctgatgatgggcctgagccgggaagagattgagcgcttaatgccagagatcgaagcctttgcggatatcggcgactacattgaagagcccgtgcgcatctactccagcgggatgcaaatgcgcctggcgttcgccgtggccacggcctcacgcccggatattctgatcgtcgatgaagcgctttccgttggtgactcccgttttcaggcgaagtgctacgcccgtattgcggactttaaaaagcagggcaccacgctgctgctggtctcccacagcgccggggatatcgtcaaacactgcgaccgcgccattttcctcaaaaatggtgatatctgtatggacggcaccgcccgtgacgtgaccaaccgttatctggatgagctgtttggcaaagccgacaaaaacagcgcgccaaaaagcgcaacggcaacctcgtcagccagcggcgaaagtcagatgtctctcgatgagattgaagatgtataccacacgcgcccaggctaccgtccggaagagtaccgttgggggcaggggggtgcaaaaatcattgattatcatatccagagcgccggggttgattttccgccttcactgacgggcaatcagcagaccgatttcctgatgaaagtcgtatttgaatatgactttgattgcgtggtaccgggtttgttaatcaaaactctggatggcttatttctatatggtaccaactctttcctggcctcggaaggccgggaaaacatttcggtatcacgtggggacgttagagtatttaaattcagttttccggttgatttaaatagcggtgactatcttctgtcgtttggtatttcagagggaagcccgcaaaccgaaatgacgccgctcgatcgtcgctatgactccatcattttgcatgtaactaagagcatggatttctggggagtgattgacctgaagtcgactttcaatagttaccaatgaagatgagaaaaaatcattccatgactactaatacacataaattggttagcgaattacctgaaatttatcagactatttttgggcatcctgagtgggatggcgatgctgcacgagactgtaatgaacggctcgcgctaattagtgaacaatatgacagcttgtccagagagttaggaaggccactacgggttctcgacctgggctgtgctcaggggttcttcagtttaagtttggcaagcaagggtgccagcgtattaggtatcgactttttgcagcagaacattgatgtttgtcaggcgcttgctgaagaaaatccacattgtgatgtcaaatttcaagtcgggcggatagaagacattgtcagcactctggaagaaaaccaatttgatctcgccattggactaagtgtttttcaccacattgttcatctgcatggggttgctgaagtcagatcgctgttagagcgtttggcaaatctgacgcaggcgatgattctcgagctcgctgtcaaggaggaaccactctattgggggaaatctcagcctgaagatccgcgtgaacttattgaccaatgtgctttctatcgattgattggaagatttgacactcatctgtctaatatttcacgtccgatgtatattatcagtaaccacagggttattcttccggaatttaatcagccttttacttcatggcgcgacagtccttacaccggagcaggctttgcgcataaacagagccgtcgctattatttctcttcggagttcatatgtaagttctatcgttttagtacagtaagttgcttactaactgataaggagagcgagcgtaatcgtactgaactcgcccatgaagaagcttttcttaaatctccaccatctggcttaaaagtgccggcgttgtttactgcaggggggaatggagaagcgggatggttggtaatggaaaaaattcccggagagttgttaaacgacgttctggccagtgaacggcatattgatcgggaaaaagttatttccgatctcctcgaccaattagttattttggaagaacatggtctatatcatgatgatttcagaacatggaatgttttaattgacgataatgacagcgctcgtttaatagattttggttcgattggcgatgtacaacaagactgcagctggccagttaatattttccagtcgttcattatttttgtaaatgaaatattttgtgaaaataaatcctggaggggcttctggcgttccgcaccattaagtcctttccagttgcctgaaccgtattcaaattggttgacagcattctggaaacatcctgttggtgagtggagttttgctttactccaacaactcttttcaaccaaagatgctctaccggctgcgagttccattatggacgcttctgatctatgggtccgggctcaggagcccgtattgttggaaagtcaaacgcaaatacgcaatacggatgcgcgggtagtccgtctcgagtcgcaaatcaatgaactcacctccctgattaatattatgggtgagagcattcagacgtttgagaagcgtgagtatccgccacaagacgttactactaatgtacagccgcgtatcgagattgagcagagtaaagccgttgattcagaagagattatgcgacttcatacgcagctcaatgatgctcagcaagaaatagagaatctacgtcatgagattgctaaaattcattatagtcgctcatggaaaatgaccaagtggtatcggtacgctggcttacagtactatctgcttcgtcagtacggcttcaaacagcgttttaagcatttactcaaacgagtgcttagcaacgtattttattttttgcgtgcacatccacgactaaagcagaaggtgatcaatctactgcgtacaattggaatttatgactttgcttatcgtatgcatcgtcgtatgaatcctggttcacataacccttatccaaacgacccacaataccagtcgcagactgaaaagcagatcttacatccagagttattgcctccggaagttaactcaatttttagcgagcttaaaaacaaaagataaggtgagtcacttgcatattttgattgacgtacaaggatatcaatcggaaagtaaattccgtggagttggtcgcagcacctatgaaatgagtcgtgcgatcataaaaaatgcgggccagcatcgagtaagcattttaatgaatggcatgtattcgattgatagtataaatgaaattaaaaaaagctggggtgatatattaccgcaggaagaaatgtttattttttcagctgctggccctacagctcttcgcgactgtgaaaaccatccccggagtgttgccgccacactagctcgtgaacttgctattgctaatatcaatcccgacgttgtttttattattaatttctacgaaggttttgacgatagttataccgtctcaattcctcaaactacagtaccatggaaaacagtttgtgtttgtcacgatctaattccgttactgaataaagaacgctatctgggcgaaccaaacttccgtcagtattattatgataaactagctcaatacgaaagggcggacgctatttttgctatttccagatcatccatgcaggaagttatcgattacacatcgattccggcagaaaaaattattaatatttcatctggagtaagcgattcatttaaaattaaagattatactcacgatgaaatcaaagacttacgtaataaatatcatcttcctcaagagtttattctttctttggcaatgatagagccacgtaaaaatattgaagcgctgattcatgcatatagtttattaccgcatgccctgcaacagagttatcccttagttttggcctataaaattagcaccgatgaaaaggaaaggctgtaccgagttgcagagaactatggtttatctcgtaatcagcttatttttacaggcttcttaaacgatagtgaccttatcgcactttacaatttgtgcaaaattttcgttttcccctctatacatgaagggtttggcctgccgccactagaagctatgcgttgtggtgcagctacgctgggttcaaatgtgaccagcttacccgaggtcattggtatggaagaggctttatttaatcctctggatgtccccgacatttgccgtgttatgcaaagggccttgactgacagtgagttctactcagcattaaaagctcatgctccggcgcaggcggcaaagttcacatgggatcacaccgcgcagctcgcgttaaagggatttgagaggcttgtagataaggcttccgcatcagaacctctggatatcacaagcttcaccgcacacaccattaatagaattaaaaatattgcagaattaagtgaaaccgaacgcttacagacagcctgggcgattgctcgtaatagctttgctacacatcagcgcaagctgctggttgatatttctgttcttgttgagcatgatgcgaaaacgggaattcaacgggtttctcgcagtatacttagtgaattactgaaatctggcgttgctggttatactgtcagtgcggtttattatcgaccgggtgaatgctatcgctatgccaacgaatacctgaatacccattttaacggggcgttcgggcctgatgtacctgtactgtttaccaaagatgatattctggttgctaccgatctaactgcccatctgtttcctgagcttactgtccagctggattttattcgtctatccggtgccaaggtttgttttgttgtgcatgacattctgcctctgagaagaccggagtggagcgatgagggaatgcaacgcgtgttccccatttggttatcttgcattgcgcagcacgctgaccgcttgatttgtgtatcagcaagcgttgcagaggatgtaaaagcctggattgcggaaaacagccattgggtgaaaccgaacccgctgctgaccgtcagcaacttccatctgggagccgacctcgatgccagcgtaccgtccactggcatgccggataatgcccaggcgctgttagcagcgatggccgcggctccatcatttatcatggtgggcacgatggaaccacgcaaaggacatgcgcagacgctagcggcatttgaagaattgtggttacagggcaagaactacaatctgtttatcattggtaaacaggggtggcatgttgatgatttatgtgaacgtttacgtcaccatccacagctaaataaaaaactattttggctacaaaacattagcgatgagttccttacgaagttgtattctcagtctagtgcgttaatcttcgcatctctcggagaaggctttggcctgccgttgattgaagcggcgcagaaaaagctgccagtgattattcgcgacattccggtgtttaaagagattgctcaggaacatgcgtggtatttctccggtgaagcgccgtccgatatcgcgaaagcggtagaagactggttagccctgtacgagcaaaacgcgcatcctcgttccgaaaatatcaactggttaacctggaaacagagcgcggaatttctcctgaaaaacctgccgattatcgcgccagccgcgaagcaataatcgctatcaacagggctaccccggtggcccttgtgatgagttcgttatgaaaattatttttgctactgagccaattaaatacccgttaacgggcatcggtcggtattccctggagctggttaagcggctggcggtcgcccgcgaaatcgaagagctaaagctgtttcacggcgcgtcgtttatcgatcagatcccccaggtggagaataagagcgataccaaagccagcaatcatggtcgtttgtcggcgtttctgcgccgccagccgctgctgattgaggcgtatcgcctgctgcacccgcggcgccaggcgtgggcattgcgcgactataaagattatatctaccatggtcccaatttttacctgccgcatcgcctggaacgcgcggtgaccacgtttcatgacatctccatttttacctgcccggaatatcatccaaaagatcgggttcgctatatggagaagtccctgcatgagagcctggattcggcaaagctgatcctgaccgtctctgacttctcgcgcagtgaaatcatccgcctgttcaactatccggtggagcggatcgtcaccaccaagctggcctgcagcagcgactatattcctcgcagcccggcggagtgcctgccggtcctgcagaaatatcagctggcgtggcaggggtatgcgttatatatcggcaccatggagccgcgtaaaactatccgcggtctgctgcaggcctatcagctgctgccgatggagacccgcatgcgctacccgctgatcctcagcggctatcgcggctgggaagacgatgtgctgtggcagttagtcgagcgcggtacgcgtgaagtgtggattcgttacctgggctatgtcccggatgaggacctgccttatctgtacgcggcggccagaacctttgtttatccctccttctatgagggattcggtttacctattcttgaagcgatgtcttgcggtgtgccggtagtatgttccaatgtcacttctttgcctgaagtggttggcgatgccggcctcgttgccgatcctaatgatgtagacgcgattagcgcgcatattttgcagagcctgcaggatgatagctggcgggaaatcgccaccgcgcgcggtcttgcccaggcgaaacagttttcgtgggagaactgtacgacccagaccattaacgcctataaattactctaagggtgtcagttgagagttctacacgtctataagacctactatcccgatacctacggcggtattgagcaggtcatttatcagctcagtcagggctgcgcccgccgggggatcgcagccgatgtttttacttttagcccggacaaagagacaggtcctgtcgcctacgaagaccatcgggtcatttataataagcagctttttgaaattgcctccacgccgttttcgttgaaagcgttaaagcgttttaagcagattaaagatgattacgacatcatcaactaccattttccgtttccctttatggatatgctgcatctctcggcgcggcctgacgccagaacggtggtgacctatcactcggacattgtgaaacaaaaacggttgatgaaattgtactagccgctgcaggagcgattcctcgccagcgtagactgcattgttgcctcgtcgcccaactacgtggcctccagccagaccctgaaaaaatatcaggataaaacggtggtgatcccgtttggtctggagcagcatgacgtgcagcacgatccgcagcgggtggcgcactggcgggaaaccgtcggcgataacttcttcctcttcgtcggcgctttccgctactacaaagggctgcacattctgctggatgccgccgagcgtagccggctgccggtggtgatcgtcgggggcgggccgctggaggcggaggtgcggcgtgaggcgcagcagcgcgggctgagcaatgtggtgtttaccggcatgctcaacgacgaagataaatacattctcttccagctctgccggggcgtggtcttcccctcgcatctacgctcagaggcgtttggcattacgttactggaaggcgcgcgctttgccaggccgctgatctcctgcgagatcggcaccggtacctcgttcattaaccaggacaaagtaaatggctgcgtgatcccgccgaatgacagtcaggcgctggtggaggcgatgaatgagctctggcataacgatgaaaccgccagccgctatggcgaaaactcgcgtcgtcgttttgaagagatgtttacagccgaccatatgattgacgcttacgtcaatctctacactacgctgctggaaagcaaatcctgaggccagctacccccgccgttgcggcgggggtcaacgcgttagtgtcgactcttcagattatcaatcacttccccaagatccagcccctggtcctgcagcagcaccagcaggtgatacatcaggtccgacgcctcattcttcagttcgaagcggtcgttcaccgtggcggccagcgcggtctccacgccttcttctcccactttctgcgcaatacgcttggtgccgctggcatacagcttcgccgtataggagctctccgggtcggcgtgcttacgctcggccagcagctgctccagctgatagaggaagagccactggtggccggtttcgccgaagcagctggtggtgcctttgtggcaggtcggcccgatcgggtttaccagcaccagcagcgtatcgttgtcacagtccggcgtgatgctcaccacgttgaggacatggcccgaggtttcacccttggtccacagccgctgcttggtgcgtgaataaaaggtgactttgccggtcttttcggttttctccagcgcctccttgttcatgtagccgtgcatcagcacttcgccggatacggcgtgctgcacgatggccggcatcatgccgtccgttttttcccagtccagctgttcagtcaacatacccttatctccacgccctgtgccgccaggtacgctttcagttcgccaatattaataatctgtttgtggaataccgaggccgccagcgcgccgtcaacgtcggcgtcgcggaaggcttcgaggaagtgttccatagtgcccgcgccgccggaggcgatcagcgggacgtggcacaccgcgcgaaccttcgccagctgctgcaggtcgtaaccgttgcgcaccccgtcctggttcatcatattgagaacgatctcgccggctccgcgcttttgcacttcctgcacccaatcgagcgtctcccactgcgttacccgggtacgactctcatcgccggtatattgattgacgtgatacttaccgctctcggcgtcaaaccaggtatcgatacccaccacgatacactgcacgccaaagcggtcggcaaggcgggtgatcagcgtcgggtcggcgagagcaggggagttaatcgagatcttatcggcgccgaaggagaggatctgcgccgcgtcttcctgcgacttgatcccgcccgccacgcagaaaggaatatcaatcacttccgctacccgcgacacccagctcttgtcgaccacccgaccgtcgctggaggcggtgatatcatagaacaccagttcgtcggcaccttcgtcggcatagcgcttggccagcgggacgatgtcgccaatgatctcgtgattacggaactgtacgcctttcactacctggccgtcgcggacgtcgaggcaggggattatccgttttgccagcattgaatggcctccgttacgttgaatttaccttccagcagcgcgcgaccgacaatcacgccgcgcaccccggtgccgcgcagggcggcaatatcattgagatcgccgatgccgccggatgactgaaacgccacctgcgggtagcgggcgcagacttcctcgtacagcgagacgttagagcctgccagggtgccgtcgcgggagatatcggtgcacagcacgtgctgcaggccgaccggcagataactttccaccagctcctccagcgtcacgccggagttttcctgccagccgctgaccgccacctgcttattgccgtcggcgtcgatacgcacgtcgagggcgagcaccagccgttctgggccaaagcgtttgaaccagcctttcacttcctccggggatttcaccgcggtggagccgaccaccacgcgggcgacgccggcctcaagcagggccgcgacatccgcttcggtccgcacaccgccgccaacctgtaccgggacgtcaaccccggcgaccagcgatttcagcagcgggatttggcgtttcgccggatccttcgccccggtcagatcgaccaggtgcaggacttccgctccctgagcggcataggcctgcaggcgcggcagcggatcgctgccatagtcgcgctgctggccgtaatcgccttgatggagacgaacgacggtgccgtcgattaaatctaaagcaggaataatcatcacatctccaggaagtttttcagcagctgcgccccggcgctcccggagcgctccgggtgaaactgcacgccaaagaagttatctttctgcaccgcggcggtgaacgcctcgccgtaattgcactgggcgatggtgtacgggttgaccggcatggcgtagctgtgcacgaagtagaaatacgcgccttcttcaatgccgcggaacagccgatcgccagctttggcatacacccggttccagcccatgtgcggcagcggcagaccgtggtcggtcatcttcggcacctcttcttcgataatgcccagcagatcgacgccgttgttctcctcgctgcgcttgccgagcagctgcatgcccaggcaaatccccagcaccggctgggtacaggctttgatcaggtcgatcagctcccggtcgcgcagctgatccatcgccgcctgggcggtgccgacgccgggaagaaacagtttatcggcacgcaataccacttccggatcgcggctgaccaccggctcatagccgtggcggccaatcgccgatttcaccgaattgaggttggcgcagccggtatcaaggatcaccacattcattacagcacccctttggaagacggcagggcatcgccctggacgcggatcgcctggcgcagcgtacggccaaaggctttgaacaggctctccacgcggtggtgatcgttcttgcccttggttttcaggtgcagggtcaccgccatggtgtaggagagcgagcggaagaagtgttccaccatctcggtgctcagatcgccgacgcgctgataggtgaagtccgccttatactccaggtgcggacggccggagatatccagcgcgcagcgggcaagacactcgtccatcggcagcacgaagccgaagcgattgatgccgcgcttgtcgccaagggccagcttcagggcttcgccgagggccaggccggtatcttccaccgtgtggtgatcgtcgatgtacagatcgccgccgacgttaacctccatgcggaagccgccgtgggtggcgatttggtcgagcatatggtcaaaaaagccgacgccggtgtggatcttgctgccgccttcgcggtccagccacactttcacatccacctgggtctctttggtgatgcgctcgacgtgggcatagcggtcgcggcgggtcagctgctcgcagatggtcggccagtcgagcgtctcgcggtcatagcgcagaccggtaattcccatgttatccgccagctcaaggtcggtggcccggtcgccaatcacatagctgtgggatttatccagcacgccctcttccagccacggcagcaccagctgcgtttttggcttgcggcaggcgcagttgtcgcccgggaagtgcggacaaatcagcacctcttcaaagttaacgccctgcgaggcgaagatctgcatcatcaggttgtgcgggccatcaaacgcttcctgcggcagactgtcggttcccaggccatcctgattggtgatcatcaccagcttatagccttcctgctgcagcttcagcagcgccgggatcacctgcggctcaaacgccagcttgtcgaaccggtccacctggaaatcctccggcggttcggaaatcagggtgccgtcacggtcaataaagagatacttctgggtcatacattctccgcagtcaaagcgtcaatcacgcgctggctctcggcacgggtaccgatagtgatacgcaaacagccgcttaatgaaggttgtttattctggtcacgtaagataatgccctgatcccacaaagatttaaacactgcgctggaggcggttatccgcgccagcacatagttggtctcggaatcgaagacctgctccacgcaggcgatgccgcgcagctgttccaccaggtagcggcgctcgtcaaggatctgcgccacgcgctggcgcatcgcggcgatcccctccgggctcagggcctgggcggcgatatcggccaccggcgtggagagcgggtacggggcgatcactttcagcagcacgttgatcacctcggcgttggcgagggtgaagccgcagcgcaggccggcgagggcgaaggctttggacagcgtgcgcagcaccaccaggtgtggatagtcgctgagccagccggagagcgtcgcctgcgggcagaattcaatataggcttcgtcggccaccacgatggctttgttgcgggtcatctccagcaggtcgcgcatcgactgcgggtcgataatctgcccggtcgggttgttcgggctgcagacgcagaccaccttcacgccggcccgccgcgcctcgatgctcggaacgtcgtgctgccaggcggccagcgtcggccagcggcggcccccgaccccgagtgggtcggcggggacgctggccatggcggcggtcggaggggcgggacagccacgcgtgagcccgtggcccacggacgcgggggggccgaccc

SEQ ID NO: 189 - DNA, 22654 bp, Unknown
  source: /note="Description of Unknown: MKP2_2161_1 Mutant Bacteria sequence"
gtggggggggtggggggggggcgggggcgggggggtgctgtggggggggcccggctggggtcgaggcggacgaagtgctcaaacagccggtcgcgctcctcgggggcgattcccgggccgtcatcctcaaccagcaacgatgcgcgcgaaccctgcagcgtcaggctgaccgccacccgctggctgctgtagcgcagggcgttgttgaccaaattatccagcacccgctccatcagtcgcatatccagcgcgccgtagttaccgtgggtcagcgtcgccagggcgacctcgcgctgtgggttaaccatctggatatcctcgacgtgatcgctgatccaggcgggaaaatcgggagtcgtcaggctgagctccgtctgcgggcggtcgaggcgggcgtaggtcaggagctcttcaatcagcgcctccagctgaccgatatcgcggttcagcgcctgcgattccgcctcgctgagattctcgctcatctccagacggtagcgcaggcgtaccagcggtgtcctgagttcatgggcgatgccgtcaatcagctgctttttgctggcaataagcgcattaatgttatcggccatttggttaaaggccaccccgagccgctcgaagctggacatactgtcgaagtgaatgcgctcgctgaggtgaccttcgccaaagcgctgggcggccgtctcaatgcgcagcatgtcctgccagtgcgggcgcatccagataaacaccggaaaggccagcgagatagcaataaacgccatcagcgccacgtccagcaggcgcatctcatgcagaaaatagagatagggcaccggacccaccgacagcacataatggctgcggggaatgcgctgaataaaggtgtactgatcgtcgagggcgacgatatcgccggcgcgcaggtgctgcatcgagctttccgacagcttaaatttgctgatcggctcgatgtgcagatcaaacgataaattcaggtccagctctttaagggtcttgctccagtcgcgcggcggtatctcccgcagctcgctgcgcatcagatacagcgagcttttcatcaaatcgtcaagcgactgccgtccggcgcgctccgcggtaaatttatagaccagaccgaccagcatggtcatcaccagaaagcagacgaagagcagaagatagaactgcacgaacagctttttcattacattaccgcgtattcaagagaaacctgtctggcgccccaggggcatcttctgcgcgtcggggagtcaatgttatcgatatccccgggcgaggcgcggggaaatcatagatacgctatcaaagcagggtttatgccccctgacaatagccagcctggagacagaacggtgaaaaggtgacggtgtcactcgatgcggtgatttcttcacctcggggggagctgggcaatcgtattttgtgcgtcgatggatacgctactcacgataataaggaatgtctaccggataggtggtcgtcagactcagcagccgacagcgcaccagcttttccgtttcggcataccagtaagcaaactcgccggtggtctggtggtaaatcatctgatcgaggttggcaaacgggatcaccagcagcggcccctggcgaacgtggccgccgccggtttcaaagtgatgctgcccccaggattgctgggtatgttcatagcgatgaaggatcacctcgatttgcccgcgctgcggacagaggagtcgaatatcggcgttgtcgagggaaaaagcccagccagagagagaagtgaacagtgagagtgccaaaagtacaacgtatttcatcatgcaaaagtcctgtgttttcaggctttatgccactctggcagcggtaagtccttgagcacaatcatattgaggagttatgtgatggggttctgtacggctaattctattgatttagtcaatatgacaagttccggtgatgaatgtgcgcgccagggacgaacgcagcaggcagcaaacgtgataactttgccgccggcgagcgcgcaatgagcgggcccctcgcagggccgcagaagggccgcttagttatcccaggcgtgaggggcgaacaggtagcctttgttgcgaacggtcttaatacgatagggctccgtggcgttgtcgagcagttttttgcgcaggcgggagatagccacgtcgacgctgcgatccatcccatcataggtaacgcctcgtaaatttttcagcagtgcgtcgcggtccataatctgcccggcgtgggtggccaactcccacagtagatcgaaatcggcggtcgacagggcgacgttttctccgccaagcagcacctggcggttgaccgggtcaatggtcagcgagccgaaggagatggttttatgtggcgtgagcgttgaggaggcggatccggcgcctgccggagcaatatgctggcgcaaatgcagacgcagtcgcgcgaggagtaccgctggcggggtggttttcagaatataatcgctggcgcccatctccagggagaggatatggttcatatcgctgtcgagcgaagtcagcaggacaatcggcccttgccattgcccgcgcagatcgcgacagagcgtcattccgtccttgccgggcagcataatgtccagcagcaccagatccggtttctcccgcgcgatcacctcctcagcgcggtcgccgcgaggctcgaccaccacatccatatcatgcttgccgagataggcggcgatcagcgtgcctacctcagggtcatcctcaacaaaaacgattttattcatgtctattgcacatcagtaaaagaagtaacatacaccgcacttattttacccgccattactcttttataaacagcgttaaatccgctatgctgccctaacttattgattcactgttaaggcatacgggcatggggctgttaatcaaagggctgttgggagcgctggtggtggtgctgattggcgtgctggcgaaaaccaaaaactacgctatcgctggcctggtcccgctgtttcccacctttgcgctcatcgcccattatattgtcgccagcgagcgggggatcgaagccctgcgcgcgaccatcgtattcggcatgtggtcgattcttccctattttatctatctgctgtcactgtggtatttcaccgggattatgcgcctgccgttggcgctggcaggcgcagtgggatgctgggggctgtgcgcctggctgttaatcctcggctggagccgtttccactagcgcagcgggcggccgccgtcgacagcgaatgagcggccggtaacgtagcggctggtaaacaggtaatcgatgagatcgctaatctctttttcgccaggggcgattttcatcagcgatttatccagcgcctgctgacgataggcctcgtcgtcaccctcattaaacatgattagcgacggcgcgatggcgttgaccttaacctctggcgccagcttgcgagcgaaggagcgggtcatgttatccagggcggctttgctggcggcataggcgatatgtttgtcgctcccgcgctccaccacgtaatcggtgatatggataatgtcgctggcggcatggccgtggccgcgcagcaacgcctccagcgcatggttgagcagatagggggcgtggacgtggatctgcatcatgcggttgatgacggcgctcagcgggacgcccggcttttccgccatccagtcgctggcgttatggatgatggcgcgcagaccgtcggtgtgtgatttgaccgcttcagcgaaggtcagaatgccgtcatcgctgctaaaatcggcctgcaggcagagcgcgcccgcttcgcgcaggccgtcaatcgccggatagggcgtacgatagctgacgataaccggctggcgctgctgcagaaaatggtgtgccagagcgaggccgatgcggcggcctgctcctgtgatcagaatcgggcggggctgttgttcagccatgggtatctcctatgcgttctgcggcagggcgaccgcttaccccaccagcatccacgttgccggcaaagcggcaaccagcaataaaccaattagcgccacttcgcggcgtttgagcgaacgatcgtgctggtgcgtacgtcgggcgtacaaaaagaccagaagacccggagcgtaaagtaccaccgacaacagcaaatgcacaggccccgacgcgtataataaccatatgccataaatacaggcgccgatagccaccgctttatgcagcgggcgagtggcgattttcagcagaaaggcgccgaccagcagatagggcacgagaatcatctcggaggcaatggtcagcagcgtgccgtagtccgatccggtcagccagatcagcaccagcgatacctgaacgctgatattggtcaaccacaatgaggcggagggggcgttgttgctattctgacgggcaaacaggcgcgggaaggctttatgagtggcggcgaggaaaggcacctccgcggccatgatggtccagctgagataagcgccgcacaccgacacgatcagcccggcggcaatgacgatctccccccacgaccccatcagcctgaccatcagtcccgccatcgacgggttgcgcatttcggccagttcgctgcgcggcacaacgcccagcgacagcagggtgaccagcagatacaccgcgagggctgacagcaccgccagcagcgtcgcgcggccaacgtcgcgcttgtgtcgcgcccgcgcggacacgactaccgccccctccacgccgataaacacccacagggtgatcagcatggtgtttttgacctgttcccataccggcacgcccagcgccaggccgctaaaatcgaggcggaacgtatccagctgaaaggccagggcggcgagcgcgacaaaggcgcccagcggcagaagcttggcgagggtggccaccaggttaatccccgctgccgtctggacaccgcgcaggaccagaaagtggacgacccacagcagaaccgacgcgccaacgatagactgccaggtattaccatcgccaaacaggcgcagctcaggggtatcggtgaaaaaactgagcgccgaaaagacgataacctgataggagacattggcgatcaccgcgcacagccagtatccccaggcggagcagaagccgatcagttcgccgaatccttcgcgagcgtaggtgaagatcccgccgtcgaggtcgggacgaatacgggtcaacagcagcatggcgaaagcgagaaacaggatcccgacgccggtgatggcccagccaatgagcagagcggaggggctggccacggcagccatattttgcggcaaactgaatacgccagcgccgagcattgagctaaggaccagggcggtcagggcgctcaggcccagtttcttttccattgcattcccgaggtgaaaatggctgttccagaatatttattttgcgaaatcgcataaaaatggaggattgcgctaaggcgcgggattttacggagtgtccgggggccatgcaatggcgggggatgaaaaaaaatgaaaaggcggcaatgcgccgcctttttagccagccagcagcgattatttgtacaaatcggcgctgatggtgatgttgccgccgcgttcctgccactggcgggtgatgtggtagtacttcgcccctttcttcgccgcgcgtttcgccgtctgataggagatttccgtcatgttgccgtagttgccggtgaactggatgttatcgaacggcaccatttgcgccgcagtcactttgttcacttcttcgaccttagtgccgttcggcagagtgacagtgtaacgtccacctttcgaagactgagtctcaaagaaacgcccaacgccggtacccgaacccaccgcggcggtggtggcaacgcccggaatttccacgttcttcgccgcttcgccgcctttggccagcgctgcgcggccagcttcagagtcagccgggatagcgtccgggctctgcagcacgcgtttttcagcatcttttttgtagatataagcggtaatgcgctggttgccgccctggttggcgtcaacctggcggacgataaagaacgcataggcgccttttgctttcgccgctttggtgatggcgtcgttgacttccggctggctgcgatagaagccctgaacggtgacggtgtcgtaaggcatcagctcaacggcctgatctttcggcaactccatcacgccattgataatgcgattcttcggcgcatccgctttcggcgcgtcttctttataaaggtcagccgtgacgcgccagttgccgccattgccgtagtccgacgtgtcgacaacatagaatgaggccgcgccgtctttgtcggctttgcgcgatactgcctgtaccgcatcgccaatggcattaaaccggccggtgacgacaacgcgatcgtagggcttcagcgcagccgcctgctccggggtcaactcggtcgctgcatgggcagacaacgtggcggttgtcaggagagcagacgccaggagggtgtttttaagcttcataaaaataatcctttgccttgcgcaaaccatatactggtgttgttgttgactgaaaacgtttgattattgcatttaatcgccgtgactgtctgcgtcaatttttgcttgccgcccgaatcgtatactacggaaagataacatttttcgatatgttgaaaaaacaggcgcttgaccagcaaaaacgataatcaataccacttttattagttaatgtaatgttaacacaatgatctcaatggcgataaatggcgttttataccgcaggataagcggattatcaggcctgagcggcaaattcaggtaaatattgctgcccggacccatctgagctgacaataagcaataaaatcaaaatttgtgttttatcgcagtagatcacaatcggtattttcagtaggttataaaaagtttgttactgtttcattttgtagacagcgaaagatggcgacgaagattttgccgtcctggcgttgttgggcagaaaagtaaaccatcatcaaaaaccgatggaagggaaaactatgcgtattggtgtaccacaagaaaggctagcccaggagacccgggccgccgccacgccgaagaccgttgagcaattgctcaaactcggctttagcgtcgcggtagaaagcggcgccgggaagctggccagctttgacgatgaggcctttgccgaggcaggagctgaaatcgtgaccggcgacgaggtatggcagtctgatgtcatccttaaggtcaatgctccgaatgacgatgaaattgccctgctgaatccggggaccacgctgattagttttatctggccggcgcaaaacccgcagctgatggaaaaactggcggcccgtaatatcaacgtaatggcgatggattccgtgccgcgtatttcccgcgcccagtcgctggatgcgctcagctcaatggccaacatcgccgggtaccgcgctatcgttgaagcggcgcatgaatttggtcgattctttaccgggcagattacggcggcaggcaaggttccgcccgccaaggtgatggtcattggcgccggggtagccggtctggcggcgattggcgccgccaacagcctgggcgctattgttcgcgccttcgatacccgtccggaagtgaaggagcaggtgcagagtatgggcgccgagttcctcgagctggactttaaagaggaagcgggcagcggcgatggctacgccaaggtgatgtctgaggcctttattaaggctgaaatggcgctgttcgccgcgcaggcgaaagaggtcgatatcattgtcaccacggcgttaatcccgggcaaaccggcgccgaagctgatcacccgcgaaatggtcgactccatgaaatcgggcagcgtggtggtcgatctggcctcgcaaaacggcggcaactgtgagtacaccgtaccgggcgaagtggtgaccaccgccaacggcgtgaaaatcatcggttacaccgatcttcctggccgtctgccgacccagtcctcccagctctacggcaccaacctggtgaacctgctgaagctgctgtgcaaagagaaagacggcaatatcgttatcgatttcgatgacgtggtagtgcgcggcgtgaccgttgttcgcgaaggtgaaatcacctggccggcgccgccgattcaggtctccgctcagccgcaggccgcggcgaaaaaagtggaagcgccgaaagaagcggtgaaaccggcgtcgccgtggcgcaaatatgcgctgatggcgctggcgattattctcttcggctggctggccaacgtggcgccaaaagagttcctcggccatttcaccgtcttcgcgctggcctgcgtggtgggttactacgtggtgtggaacgtctcccatgcgctgcatacgccgctgatgtcggtgaccaatgccatttcgggcattatcgtggttggcgcgttgttgcagataggccacggcggctgggtcagcttcctgagctttatcgcggtgctgatcgccagcattaatattttcggtggttttaccgtgactcagcgcatgctgaaaatgtttcgcaaaggataaggggtagcacatgtctggtggattagtaacggctgcatacattgttgctgcaatcctgtttattttcagcctggcgggcctgtcgaaacacgaaacgtcgcagcagggcaactatttcggcatcgccgggatggccattgccctgatcgctaccatcctggggccggacgccggcaacgtcggctggattattcttgcgatggtgatcggcggggcgatcggtattcgtctggcgaagaaggtcgagatgaccgagatgccggagctggtggctatcctgcacagcttcgtggggctggcagcggtgctggtgggtttcaacagctacctgcagcatgaaaccggtatggagcaaattctggtcaatattcatttgaccgaagtgttcctcgggatcttcatcggcgcggtgaccttcaccggttcggtggtggcgtttggtaaactgcgcggcaaaatttcctccaggccgctgatgctgcccaatcgccataagctgaacctggcggcgctggtggtttccttcatcctgatggtgatttttgttcgctctgacagcaccggcacccaggtcctgtgcctgctggtgatgaccgcgatcgcgctggcctttggctggcacctggtggcctctatcggcggtgcggacatgccggtggtggtctcgatgctcaactcctactcgggctgggcggcagcggcggcgggctttatgctgagtaatgacctgctgatcgtcaccggcgcgctggtgggctcttccggcgccatcctctcttacattatgtgtaaggcgatgaaccgctcctttatcagcgtgatcgccgggggcttcggcaccgatggttcctccagcggcggcgatgaagaagtgggcgagcatcgcgagattagcgccgaagagacggcggagatgctgaaaaactcgcactcggtgatcatcaccccgggctacggtatggcggtggctcaggcgcagtatccggtagcagaaattaccgagaagctgcgggcgcggggtatcaaagtacgctttggtattcatccggtggccgggcgcctgccggggcatatgaacgtcctgctggcggaagccaaagtgccttacgacatcgtgctggagatggatgagatcaacgacgatttcagcgacaccgacaccgtgctggtgatcggcgccaacgataccgtcaacccggcggcgcaggacgatccgaagagcccgatcgccggcatgccggtgctcgaggtgtggaaagcgcagaatgtggtggtctttaagcgttcaatgaacaccggttacgccggcgtacagaacccgctgttctttaaagagaacactcatatgctgtttggcgatgctaaagccagcgtcgatgcgatcctgaaagcgctgtaatgtaacataattgttttacaacgtttgtttataagccgtctcctgtgagacggcttttttatatgcagggggatgcctggaattgttcataaaataagcggtaagaggtgatataatgttccggttcttacatcagacagaggatattatggataccgagttaaccccaacgcagatggccatcgaattcttacgccgcgaccccaccgtcatgaccccagcgcagtatctgaaaaaacttaaactgctggagctggagtttgctgacctgatggcgctctcctcgctggagctgaaagaagagatcgatctggcctggcgtctgggtatccactaagccattctcgctggacagcgacaggggccgccaacggccctttttttgtgcctggctggcagcaagcaaaaaaatcccccgcgcggcgggggaagatgagcggtggcggttaatcgtcgtcgtcgtcgtccagttccaccggcgtctggtaggcctccggtttcagcaccagcaggtcacagcgcaggtggtcgacaacctgttccgcggtattgccgaggaacgccgccgacaggccggtacgtccgaccgttcccagcaccacgatccccgcctgcagatgctcggcgaggtccgggatcacctcttcaggcagtcctttttcgacgtgggtgaatttttcatcgatgccaaacttctgccgcagcgctttcatcgccagcagatgctggccgcggatcgcgtcgttgtagacgctgggatcaaaatccggcagttctatcgcgatattgatcggcgtcaccgggtaggcaccgatcaggtgcacttcagtgtggttgacttcttccgccagcgacagcgtctcgcgaaccagcttctcgttaagggtgttgtgataattctcttcgctggcgagattgacggcgaccagcgctttgccgccttccggccacggctggtctttgaccatccacaccgggcaagggcatttacgcagcagatgccagtccgtcggggtaaagatcaccgcctccagtttgtcgtgctggtgggccatcttcagcagcagatcgtgtttctcactgaccacctcctgaataatcgcttcgaaggggcggttgtgccacaccactttcacgtcaatcggcacgcccgattccaggtagaatttcgcctgctcgcggatccaggccgttcgttgggcaatgacgccctggcgcattgccgtccgctcgtccggcgacagcagggtggtcatttcataggaaaaatcatagatcggcaaaaaggctttgatgcgtccaccaatccgttggtgcaggtacaccgctcgccttagcgccggctggtcgtcctggttaggatcgattactaccagcatgctctgatacttcgccatacagggtctccttacaactgcagctaccgtcagttattaaaaagataacctatatggatgaattgaaacaggggaggagcctggtcagatcaacaaatctgaaaaaattgccgatcgtgaccagggattgcgcagagattaagcgacgttgcgcgcctgcccggccagctgggccagcagatcgctgttttcaatagtgatatatttgcctttcaccgccagcatgccgcttttctgaaaacggcccagcagacggctgatggtttcgacggtgaggccgagatagttgccaatatcgccgcgggtcatggtcagccggaactcacgtggtgagaagccgcgctgggcgaaacgacgagaaaggttatagataaacgcggccaggcgctcttcggcattctttttggaaagcaacaggatcatatcctggtcgcctttaatctcaccgctcataaggcgcatcatctgctgacgcagattgggcatttttccggaaagatcgtcaagagtttcgaaggggatctcgcagaccattgaggtttccagcgcctgcgcaaagctcgggtgcagaccggtgccgatggcgtcaaagcccaccaggtcgcccgccagatggaagccagtgatctgctcatcaccttgctcggtgatggtatagcttttgatggtcccggagcgaatagcgtacaacgacttcagctcatcaccggctttgaacaaggtttgacctttctggataggctttttccgctcgataatattatccagctgatcaagctcatgctcgttcagagtaaaggggatgcagagctggctaatgctgcaatcctgacaatggattgcacaaccgccagactgaatgcgtcgaataattcgcttctcagggatcatatgtctgctcaggccttaattgatattggtcaattttaacatctttttgatcagcaggtaagtcttcaggcccggaaacacgtaatatcagcagggtaaatcaaatcgactgtgtatctatttgattaaaaacagattattacgccacttttgattgtaaaattacctgaaaattccagaaaaggcattttcagtcaaagcaacagatagccctcatgacgcaaaagccactctttacgctgtacgccgccggcatagccggtcatggtgccgttgcgcccgatgacccgatggcagggcaccacgatactcaccggattggcgccattggcggcgcccaccgcgcgcgcggcgccgggacgaccgagcgcctcggccagttggccgtagtgcatcacctggccacaggggatatcgcgtaacgcctgccagacctggcgctgaaaaggggtgccggcggtggcggtaggcagagtctcgataatggctaaatcgccggcaaaatagtcgctcagcttactgctgagaccgccgggattgcggcagtcgacgcgctgatagccttcccggcgatagtgtacgtcgagcagcgtttccatccgatcgcggtgctcgtcccactcgacagcgcgcaaattaaactgttcgtcgcaaagcacccacaacggccccagcggggtatccattttatcctgcagcaaggtcaacatcgtttctgtcatccaccatcgtacatgagaggcacacgataccacgcgctgacggcagtcaactatactcccaaaaggtaaaaccgcatcgccagatagcacggcgggctatccgccgtggaggcattctgcgatcgccacgatgatttatttttggatcgatcctggcgggttaccggacagggtttttgctacttttaagctgacgacgtcggtcctccgcgccgctgtgcgcgctcgggaaagtgctaccgcgtcggcgcggcgcggttaataactcagaggtggagctatgcaatatatactgactggcgtaatcgtactgatcttcagcggtctggttattcatggtatgtcgctgttgcttgagcgaggatatcgcgcgcttttcggcatattcgccggagccggggaagcgacccgtaagttcaaagtgaagatatcgcgttaagctaaggcggccgtccctggcgcatcggtgggttaagacagccgcggatagatgccagggccgatcggcagtcccaccagataccagcccaccagcaacagcagccagacggcgagaaaaatcagcgggtaagggagcaccagcgagtagtaggtgccgaggcgggcatccggccggtagcgctgtagaaagccgagaaacaacggcacaaacggtgacaccggcgccagcggcagcaccgatgaatcagcgatacgaaacaggatctgcgcaaacgccgggtgaaagcccaacagcataaacattggcacgaagatcggcgccagaatcgaccagatggccgagccgctggcgataaacatacacagaaaagccgacagcagcgcaaggccgacaaacgccggaacaccgttcatgcctgaactctccagcaggtccgtcagcccgacggccataaacttgcccatgttgctccagttgaacatcgccacgaactgcgccagcgggaagaccatcacgataaacccggccatctctttcatcggctcaatcatcaactgcggcaggtcggcctggcggcgaattttgccggtggcgatgccgtatgccagcgacacgacaaagaagaaaaagataattagcggcacgatgcctttgataaacggcgagggcatgaccgtatgctgaaccggatcgcgaagaataccgttttcggggaccaccatcagggcgatgaccgccacgaataccagcgtcgccacgccggcgatgcgcaggccgaaccgctccccgggcgtcagcgtctgcagcttttcatcacgactgccttgccactggcccagccgcggctcgaccagcttatcggtgatcagtccgccgacgagcgtcagaacgatcaccgaggtcgccataaagtaccagttgtcgatcacgctgacgtgcaaagaggcatcgatggactttgccgcctcggtgctgatcccggagagcagcacgtcggtggtgacaatcagtagattggcggtaaagccgcagcccacgccggctatcgccgccagcagaccagcgacaggatgccgaccgacggcaagaaacatcagcgctcccagcggcggcataatcaccagcgccgcatcggaagagatatggctgaaaaaggcgataaacagcaccatatagctggcatagcgggcgctgacgtgcgaggccatcttgaccatcaacgccggtaacaggcccacccgctcggcaaagccggcgcccagcaccagggcgaggatcgcccccagcggcgcgaaaccgctgaagtttttaatcacgttcggcaaaaaccagtgcaatccttccacgctgagcaggtttttgaccaccacccgcgaaccgtcagttgggttttgtaccccaacgttgagggcggagaggattgccgtggcagcgatcagcacggcgatgagatagataaacagcaaaaacgggtgcgggaccttgttaccgatcttctctacccagccatagcgctttccgccgggggaagatgacggtatggatgacatactcatgggcattcctctgttgtcgttgttgtgttgggcaggcctgctcccctactgccggcggttattatgggcggtgcgtgccgcgatccggtcagcgttggccaggagtagcctctaagtggttatcgtaaaacggacggactcacctccgccgggatcgggcaacgataggggcgttcggccagtacctgcctgagctcttgctggctggcctccagcagggcgctgtcgctgaataaacggatggcggtcgccgcgaggactttccccgccagcaacatccctttatgggcaatggaggttctgccctggctcaccagctgccagctgtgcagcggggtacccaccgcgaagcacgggctgaagcactgggccaccggcgctttccagctaacatcgccgacgtcggtggatccggcgaggacgttatccgtggccgcccagggcgccacctcatcaatcagcaaggtgtcgcggtggcgacgagcgaacgttttgccttcctcgccactggtgccggcaatattgttcaggctgttgttaatatcattggcgctgagagcggcgcggatcgccgcggcaaaagcgcgttcctcgtcgctccaggcgggggtaccgtaatgacagaccgcctgatacatcgccgcctcaagcgtgcggttgggcagatagctggagcaggctttttcaaagcggcagctgacctgggtctcggtcatcagcgcggccccctgggcaatcttctctatgcgggcgaagatttgctcagcgtcggccatctccggcgcgcggatcaaatacagcacttccgcctgcgcctgcaccacgttgggcgagacgccgccggtatcggtaatggcgtaatggacgcgcgccttctcgatgatatgttcattgaggaaattgctgccggtggtcatcagggtgacggcatccagcgcgctccggcccaggtgcggcgaattagcggcgtgggccgcggtgccggtaaatcgccatgccgcctgaatgttggcgagggtgcgggtgctgaacatcccggcccaggcttccggatgccaggtcagcgccgcatcgacatcatcaaacaacccttcgcgcaccataaaggtttttcccgaaccgccttcctcgccgggacaaccgtagaagcgcagagtgccgctgtcgccgtgctgctgcagccagcctttggcggcgaccgccgcggcgaatgccgcggtgccgagcagattgtgcccacagccgtggccgttggctcccggtgtcaagggcgtcggttccgcgctgtgggcctgctggctgagtcccgccagggcgtcaaattcgccgagcagggcaatgaccggttggccctcaccgacgctggcgataaaggcattcgggatcccgccggcatcgcgggtgagctgaaaaccttccgcctccagggcgtcggccagtcgttgggctgaccagaactcctcaaagcgggtctccgggtggtcccagatgtcgtcggcgatggcgcagtaagtgtcgcgttgtgcctcaaccacctcgtccacaaactgaaaaatggcttccattacaccccccgctgccagggaaagttaagcgcgacgcgcgccagggtttcgaccgctaccgccatcacgctctcgtcgaagtcaaacttttcgttgtggtgaccggcgctgagttcagtgccgaaaatcatgtacgaggcgaggccgccgcgcgcctggacccgggccatcatcaggttggcgtcttccgagcccgccggggcggcgatgcgatccaccgcctgttgcacgccgggcacccgggcggcctgttcgcgcagatagtccacccacgccggcgacggtgcgctggcggtcgccgcgcccatcatgcgcagttcgtagcgggcttcgtacatcgccgcagccccggcgacgacgtgctgcgcccgctcgaacacgtactgattaatggcttcgctttcgccgcgggtttccacttttaacagcgcggaagagggcaccacgttgcgcccggtaccggcctgcatcaccccgacgttgacccgcgaggcgccggcgctgtgcggcgggatggcgtgcaggccaagggcggcctgggcggcggccagcagcgcgttgcgcccgtcctcgggcttgccgccggcgtgggcggccacgccgctgaactgcacgtcgaatttggtggtggccataaagttgtctccaccgcagacgacggtacctgccggcacgccggtcccgatatggatcgccgtgaaataatccacgtcatcaaccacgccggcggccaccatcgcgcgggcgccgcgggtaccctcttcagcaggctggaaaatcagtttaatgacgccattgagctgggcggcatactgcttgagcacatgcgccagccccagcccgatggcggtatggccgtcatggccgcaggcgtgcatcatgccggcgttgcaggaggcgaaatgatcgcgatgggggcggtggctatcgtcatgctgttcgttgagatcgagggcatccatatcgacgcgaaaggccagggttggcccgggccgcccggtgtcgagcgtggccaccacgccggcgaaaccaccttcaaacgccggcagccagcgctccggcgcgccctgttcgcgggcgcgttcgaaagcccgggccagggtctcctcgtccggcagccccatccggctgtcggcatcgatgacgtcgcggcctagcgccagctgatagcctagcccgtcaagaatatccgcgaccttactggcggtgcgaaactccagccagccggattcagcgtgcaggtgaaaatcacggcgccattgggtcatggagggcgccagctggcggaggtattcatcaagttgcggcatagcttatcctgtcataagtaaaaaatgtgacggcgttcacgatgtgatagcttttgtttatcactgacgcgctacaggccttaacacccttaacctgccacagcctgatggattacagtagatgtcattttcttctgtctgataatcaacggttatcactaaaagcatggcatttcagattaaatttcatcaaattcgcgccttcgtcgaagtagcccgggaaggcagtatccgtggcgccagccgggcgctggcggtctcgcagccggcgctgaccaaagcgattaaagagctggaggaggggctttccgcccagctgttcgtccgccgcagccagggggtggcgttaaccgacaatggcgaaagtttttatcaacatgcgagcctgatccttgaggagctgcgggcggcgcaggatgaactgctgcagcgccagggggaacaggccgggcaaattaatattggccttggcgccagcgtcgcccggtcgctgatgccgtcggtgatctgccgctttcatcagcagcatccgcaggtgaaggtacggatcatggagggtcaactgctggcgatgattaatgagctgcgccagggggagctggatttcaccattaatacctattaccccgggccgtacgaccatgagttcagctttgagaaactgtttgagaaaccgttcgcggtgttcgcccgcgcgggccatccggcggcgcaggccacctcgctgggggaattgatggatcaccactggaccatgccgacgccgcgcggcagctacttcaagcagctgcaggaatgcttcgaacagctgggacgggagccaaaggtggggatcgtctgcgaaacgttctcatcctgcatcagcctggtggtgaaaagtgattttctcagcatcctgccggtggagctgggcaacgacccgctgatggccgacaaactggtgatgatccatatccgtgaagtgttacccaccgccacctattatctgatccagcggcgcgatacccggcaaacgccgctcacggcgtcgttaatcaccctgttccgccgccagagccgacaattgtttccttaatcgtccgtcgcgctcactttgccagcgaacgcggctaaacgcgttgagaggggagcgcgaggcggctatagtagctggcgacagccgctggaggagagcccatgaaccttgatgacaaatccctgtttcttgacgccatggaagatgtccagcctctgaaacgtaataatgacgtgcactggcatcccgggcgtaacagccgggccccgcaacgcgtcgataccctgcagctggataattttctcaccaccggctatctcgatatcgtgccgctcgccacgccgctggagtttaagcgagaagggctgcagagcggcgtgctggataagctgcggcgggggaaatacagccagcaggcgagcctctccctgctgcgccagccggtggaacagtgccggcagatgctcttcgcctttatggtgcaggcgcagaaagaggggttacgcaatgtgctgatcgttcacggcaaaggccgcgacgaccagtcccacgccaatattatccgcagctatctggcgcgctggctggaagagctgccggaggtgcaggccttctgcgccgcgcttccgcatcatggcggcagcggcgcctgctatgttgcgctgcgtaaatcggcgcaggcgaagcaggagacctgggagcagcacgccaagcgcagtcgttagcgcagaagcagcgtcagctcgcgggcggctttttgcagctccggcagcacgcgctcgatcatctcgcgggccgtcatctggcccgcatgcaccccgacgttgagcgccgcctggacctgcccctgagcgttaaacagcgggaccgcgagggagcgcagccccatctccagctcctgatcgttgagggcatacccctgctgatgcacccgtttcagttcggcgcgcagcttcgccaccgaatccaccgtctgtggggtatagcggatcatggtcacccgggccagcatatcgttgagcttctcctccggctgatggctcagcagcacccggcccatcgaggtcgcccacgccggaaggcgactgccgatatccaggtcgatggtcataatccgcgagctggaggcgcgggcgatatacaggatatcgtcgccgtcgagggtggcgatggagcaggactcattgagcatttcgctcagatgccgcagcaccggctgcgccgaacgcgccagcggcgtcgaggccagccaggcgtggcccagcgccaggatccgcggccgcagctggaaattcttaccgtcttcggcatacacgaaccccagcttgctcaaggtatacaggcagcggcgcaccgcggcgcgcgggatgccggtcttctgactgatctgcgagatagacagcaggggccgctgcggcgtgaacgcctgaatcacctccagaccccgcgccagggaggccataaagttaggatcgcctttaaacggatcgccgtcgccggtcagtaaatcgtctggatgcttgtccatttctgttccccatatttgccatcgatcacattctttcgcaaaagataaccgatgttcgattatcgcaccatatttcgattatcgcccttgaccgacatcgttaagcgggtcacattttgtgcgaacaacgaataaaagtgcgattaccgcacatcactggagcgacctgatgattgataaaagcgtatcgacgctgagcgaggccatcgccgggatccacgatggggcgactattatgatcggcggctttggccccgccggccagccgacctttctgattgacgccctgattgaccagggcgctcgcgacctgaccatcataaataacaacgccggcaacggggaagtgggtctcgccgcgctgctcaaggcgggccgggtgcgcaaaatgatctgctcctttccgcgccaggtggattcccagattttcgatgatctctaccgtcgcggcaaagtggagctggagctggtgccgcagggcaacctcgcggcgcggatccaggcggccggcgccgggctgggggcggtgtttacccccaccggctacggcacgccgctggcggaaggcaaggagacacgggaaatcgacggtcgccactacgtgctggagtacccgatcaaagccgatttcgcgctgattaaagcccaccagggcgaccgctggggcaacctggtctatcgcaaggcggcgcgcaactttggcccgatcatggcgacagcggcgaaaaccaccatcgtagaggtctcgcagctggtggcgctgggcgacctcgatccggaaaacatcatcacccccggcattttcgtccagcgcgtcttctcgctggaaaacctgactgccgcacaacgcgcctgaggagcccgacatgcaaaaactgacccgtgacgaaatggcccagcgcgtggcccgcgatattcccgaaggcgcttacgtcaacctcggcatcggcctgccgacccgcatcgccaattacctgcccgctgacaaagaggtgttcctgcacagcgaaaacggcctgctggggatggggccgaaaccgcagcccggggaagaagatcccgagctgatcaatgccggtaaagagtatgtcaccctcctgcaggggggctgctatttccaccacggcgactccttcgccatgatgcgcggcggccatctcgatatctgcgtgctgggggcctatcaggtttccgccagcggcgacctcgccaactggagcaccggtgcgccggatgcgatcccggccgttggcggggcgatggatctggccatcggcgcccgccaggtatttgtgatgatggaccacctgacccgtgacggcgagtgcaagctggtggcgcagtgcagctacccgctgaccggcgtcggctgcgtcagccggatctataccgacctggcggtgatcgacatcaccgaccgcggcccggtggtgcgggaaatctttaacggcctctcttttgaagagctgcagcgcatcactccggtggcgctgacctttcaacaactggcggaaagcgcgtaaggaacctatgatgaatcaggcatttatctgtgatgcggtgcgtacaccctttggccgtttcggcggtgccctggcgacgatgcgcgctgacgacctggcggcgctgccgctgaaagcgctgctggcgcgcaacccgggactggatccctcgcgcattgacgatgtgatctttggctgcgccaaccaggccggggaagacaaccgcaacgtggcgcgaatggcgctgctgctggccggcctgccggagagcgtgcccgggagcaccatcaaccgcctgtgcggttccagccttgacgcgatcggcgtcgcggcgcgggcgattaaaagcggggagacgcagctgatgatcgccggcggggtggagagcatgtcccgcgcgccgtttgtgatggggaaagcggagagcgcctttagccgcagcatgcagatggaggataccaccatcggctggcgctttattaacccgcagatgaaagccctgtacggcgtgcattccatgccggagacggcggaaaacgtcgccgatgagtttgccatctcccgtgccgatcaggacgcgttcgccttacgcagtcagttgcgtaccgccgcggcgcaagaggcggggcgtttcgccgatgagctgatcgccgtccaggtgccgcagcgcaaaggcgagccgctgctgtttagccgcgatgagcacccgcgccgcccccggccggaggcggcggccaaaccccggccgcacgcacccccggcgcggccggccccgg

SEQ ID NO: 190 - DNA, 21623 bp, Unknown
  source: /note="Description of Unknown: MKP2_2161_1 Mutant Bacteria sequence"
cgacggcaggccaaaacgggacggcgcgcgcgccacgccccccgtcgccccgccgccggaggccccgccgccgtcgctggcgcagtagcccgtgaggaagaggccgccgccatccagcgcgcgggcaaagcgctgggcgtgcgcctcgtcggtggtatagaccgtggcggacaggccaaactcgctgtcgttggcgagggccagtgcatggtcagcgtcgcgagcggtggtcagggttgctaccggaccaaacagctcctgacgaaagccggtcatcccggcggtgacgttgcccagcaccgttggcgcatagtagttgcccgccccttcgattttttccgcgcccagcagcagagtcgctccttcatcaagggtcgccgttacctgctggtgcagttcatcgcgtaaatcgaaccgcgccatcggtccgacgtagttttgctcgtcgcgcgggtcgcccatcttcagcgctgccacggcgtcgacaaatttgcgggtgaaggcctcggcaatgccggcttcgagaataaagcgtttcgacgccgcacacacctggccgctgttctgatagcggccggtgacggcggctttcaccgcgtcatcgagatcggcatcgttgagcacgataaagggatcggatcctcccagctcaagcacgcatttcttcagcgccgcgcccgcctgggcgccaatcgccttcccggcgcggacgctgccggtgacggtcaccgccgcgatgcggtcgtcattgataatctgcgaaacgccgtcattggtggcgttcacccaaccaaatacaccatccggcaggccggcggcggcaaaaatttcgcccagcagacgggcgctgcccatcacgttcggggcatgcttcagcagatagctgttgccggccagcaggatcggcaccgcgccgcgcatcacctgccagaccgggaagttccacggcatgaccgccagtatggcgcccagtggacgatactcaattaccgcctggttattttccaccagggtagcttccgtcgccagcatcgccgggccgtgttcagcgtaccagtcgcagaggttggccgatttcgccacctcgccgcgcgcctgagcgatcggcttgcccatctcaagggtgatcatctgggccacctcttcaccgcgggcgcgcagcgcggccccgatgcggcgcagggcgtcggcgcggtcggcaagcggcgtctgacgccactggcgatagcccgccgcggcgagcgcgatggccgcgtcgacctcgcgttcgctggcccacggcagcgaggagaccacctcaccggtagtcggattgacggagacggcgtgcgttgcagataaattcatcattattctctctcgttgcttgcgaagtgtccgtattctggcttacctttccattcattgaaaatgaataatattaagcaacacattcacaaaagaagaatatcatggacctgactcagctagagatgtttaacgctgtcgccagcaccggcagcattacccaggcggcgcagaaagtgcatcgcgtgccgtccaacctcaccacccgcatccgccagctggaggccgacctcggcgttgagctgtttatccgcgagaaccagcgcctgcgcctgtcgcctgcgggacacagctttttgcgctatagccagcagatcctcgccctggtggacgaggcgcgaatggtggtggcgggcgacgaaccccaggggctgttttcacttggttcgctggagagcaccgcggcggtacggatccccagcactctggcccactttaatcagcgctacccgaaaattcatctggcgctctcaaccggcccttccgggacgatgatcgacggcgtactggaaggcgccctgagcgccgcgtttgtcgacggcccgctggtgcatccgggcctggaggggctgccggtgttccctgaagagatgatgatcgtcgccccctacggccacgcacccatcacccgcgccagcgaagtgaacggggccaacgtctacgcctttcgcgccaactgttcctatcgccggcattttgagagctggtttcatgccgacagagcgaccccgggcaggatccacgagatggagtcttaccacgggatgctggcctgcgtcatcgccggcgccggcctggcgttgatcccgcgcagcatgctggagagtatgcccggccatcagcaggtttccgcctggccgctggccgaagagtggcgctggctcaccacctggctggtgtggcgccggggcgccaaaacccgccagctggaggcgtttatagcgctgctgaacgaagatcggcaaacagtggtttctccataaacacgctgagcggatcgggttgatacggcgcaaacgcgcagcgggtctggtagccgttgcgcgtgtagagggcgatggccgcatgctgatggataccggtctccaggcgcagggtatggcagtcgcgctgacgcgctttcgcttccagcgccgccagcagcttttctcccaactgctggccgcggtgctggggatcgatatagactcgcttcatctcgccaaagccttcctcactgaggacaatagccccgcagccaacggcctcgccctgcgggctgcggatcgccagggcgatgaccgtctgcgacggcagctggctaaggtccagcaggtggttgctctccgccgggtagagggtctcctgccaggcgtcgagggcggcaatcagggcgataaattcggcgtcagtaggggcgatgtcggtgatggtgtacataggtgagctccttttttaccccactgtagcgcggccggcggcttttcccgacatagcattaacttatattgccgcccgcctattgcgctaacccactgaaacacagtaattttatcccctgccgttcgtacttgagatctgaatatgcacaccaaagcccgtaaagtgatgattattggcgccggcaatgtcggcgcgtcggcggcctacgccctgctcaaccagagcatttgcgaggagctgatcctcgtcgaccttaaccaacagagcgctgaggcccacgctcaggacctgagcgacgccgcggcctacctgccggggatgatgaccatctccacccgcgaggccagcgactgcgccgatgtcgatatcgcggtgatcaccgtctccggcggcgcgctgcgccccggccagagccggctggatgaactgacctccaccgcgaagattgtgaagagcattgtgccgacgatgatggccaacggatttaacggcatctttctggtggccaccaacccctgcgacatcatcacctggcaggtatggcagctttccggcctgccgcgcagccaggtgctgggcaccggcgtctggctggataccacccgtctgcgtcgcctgctggcgcaggaactggagattggcgcccagagcatcgacgcctttatcctcggcgagcatggcgatacccagtttccggtgtggtcgcactcctcggtatatggcacgccaatcgccgacctctaccagcagcgcaccggcctgccgctcgatcgcgaggcgatggctgacaaagtgcgcaagctgggatttgagatctacgcgggtaaaggctgcaccgaatatggcgtggcagggaccatcgccgagatatgccgcaatatcttcaccggcagccaccgcgcgctggcggtctcctgcattcttgacggcgagtacggggtcagcggcgcggcggctggggtgccggcggtgctggcccagggtggcgtgaagcagatcattgaactgcagctggccggcgaagagcaggcgaagttcagccagtcgatcgcggtgatcaaggccaatatcgcccgtctgccctgacggcagcctgcgagtcagtcggcaatgatcagctgcggggaaagggtctccagcgcctcgcgggttatatccggcaggtgggcgtcggtcacgatatcggtcaacgtcgtggcccccggcgcaaccgatacgccgatgcttcatcagccaggcagagaaagttccccgccgcggcttccgccgcttgggcgactgattactccgcaggaagtggtctctctggtgagctggttgctgagcgagggcgcatcggcgatgaccggacaggagctggtgatgtgtggcggcgcatcgctgggctgatgctatgtcgcacccggggagcggaagtagattaccgctccccggggcgacgcgggggcgatgattaacgcaggtaaaccgttccgcgcatataggtggtggcctggccgctaatcagcacacggtcgccctgccactggcagcgcaggtcgccgccgcgagcggagacctggcgcgccatcatggtggttttccccagcttttcgccccaccaggggatcagcatgctatgggcggagccggtgaccggatcttccggcaccccttctcccgggcagaagaagcggctgacaaagtcatactcttcatccggcgcgctgacgcagatcattttgccaagcgttcgcagccgcgccatatccggtcgcaccgcttcaacctgctggcgatccgccagcaccaccagataatcgcgcccttcccgaacttcaacggcggcctcgagtcccaacccggtcagcagatccgccggcgggttttccaccggggaggtcgaccacgccggaaaatcgagcgtcagccagtcgccattacgggtgacccgcagctcaccaacaaaacgggtgctaaagagaatcgtcgccgaaggatggtcgagatattcgaaaataacgtgcgcagcggcgagggtcgcgtggccgcagagattgatctcagcgagtgtggtaaaccagcgcagctcatagccctcgtcggtacggacaaagaaagccgtttcggattgattatgctgctgggccattttcaggagcacatcgtcggctaaccactcgctgagcgggcagacggccgcggcattgccgccaaagtttttatcgctgaaagcatcgaccagataaaattgaatttcctgcataccctgtccttactttttttactttccttcaacatgacataaaagcgcccccttgacactatccatagcaaaattaatcgcttaaccgcggccagccccttgcgatgaaatgagacgcagatcacaaaatgattgtcttttcgccaacaatcgttttaagatcagcgtcacatctttccctgaatcaccagtccagagcttatgactacgaatacggtctcacgcaaggtagcgtggctacgtgtcgtgacgttggccatcgccgcgtttatttttaacaccacagagtttgccccggtcggtctgttgtcggatattgccgacagcttcggcatggaaaccgcccaggtgggcatgatgctgaccatctacgcatgggtggtggcgttaatgtcgctgccgtttatgctgctgaccagcaaagtggagcgccggcgcctgcttatcggcctgtttattctgtttatcgccagccacgtcctgtcgttttttgcctggaattttgacgtgctggtgatcagccgcattggtatcgcctttgcgcatgcagtgttctggtcgataacgtcggcactggccatccgcatggccccgccgggcaaacgggcgcaggcgctgagcctgatcgccaccggtaccgcgctggcgatggtgtttggtattccgatcgggcgcattatcggccagtactttggctggcggatgaccttcctggcgatcggcctcggcgcgttagccaccctggcctgcctcgtaaaactgctgccgaccctgccgagcgaacattctggctcgctgaaaagcctgccggtgctgttccgccgtccggcgctggtcagcgtgtacattctgaccgtggtggtggtgaccgctcattataccgcctacagctatatcgagccctttgtccagacggtagcgggcctgagcggcaactttgccaccgtactgctgctgatccttggcggggccggtattatcggcagcattctgttcggtaaactcggtaaccagcacgcgtcggggctgataagcctggcgattgccctgctgctcgcctgcctgctgctgctgctgccggcctcgcataacccgcagcacctgatgctgctcagcatcttctggggggtggcgatcatgattatcggtctcggcatgcaggtgaaagtgctggcctccgctccggatgccaccgacgtcgccatgtctctgttctcgggcatctttaatatcggcataggcgccggggcgctggtcggcagccaggtgagtctgcatctttccatggcctccgtcggctacgtcggcgccattccggcgctggtcgcgctggtctggtcgctgatgatattccgtcgctggccggtatcgctggaagaccatcagccgcaccactcctgaatccgtcgcacaaaaaagcccgccggtatcgcgccggcgggctttttttctctgcgcatcgcgggcggtcagggatgccaggtcgaaatgatctccagcacgccattaataataaactgcacgcccatgcagaccagcagaaagcccatcagtcgcgagatggcctcgatgccgcctttgccaaccagacgcataatcgcgccggaactgcgcagacaagcccacagaatcacccctaacagcaaaaagatgatcggcggcgccgccagcaccacccactcagggaagtccacgccgtgcttaacggtcgaggcggagctaataatcatcgcgatggtgcccggaccggcggtgcttggcatcgccagcggcacaaaggcgatattggcggtcggttcatcctgcagttcttccgatttgatcttcgcttccatcgaatcgtgggctttttgctggggaaacagcatgcggaaaccgataaaggccacaatcaatccgccggcgatacgcagcccaggtattgatatgccgaatgtattcatcaccacctgaccggcataccacgacaccatcaggatggcgaagacatacaccgatgccattaacgcctgtttattacgctcggcgttgttcatattaccggccaggccaaggaacagcgccacggttgtgagtggattcgccagcggtaaaagcaccgccaggccgagccctattgctttaaacaaatcgaacatagttaattaaagtcccgttaatattcattttttaagaatggtttcattccgtgagtatatcggcttcaacaaatttgacgccagcctgctgataaatcacttctgcaaaaaaataacaagcgttagaaaaatcataaagagtgacccacatcgtacttttccattttagcaaatcgtggcatcggccaattcataatgttgacttatgattgcctgggcaatagtatcacctgcaactaattacttgcctgggcaaccattatgaaaagtaccagcgacctgtttaatgaaatgatcccgctgggccgcttgatccagatggttaaccagaaaaaagatcgcctgctcaatgactacctctcacctatggatattaccgcgacccagtttcgcgtgctctgctccattcgttgcgaagtatgtattacccccgttgagctgaaaaccgtgctttccgtcgatccgggcgcgatgacgcgcatgctcgaccgcctggcgtgcaaaggctggattgaacggttacccaaccccgctgacaagcgcggcgtgctggtgcagttgacgccggacggcgcagccctttgcgagcagtgtcatcaggttgtgggtcagaagttacaccaggagttaacgaaaaatctgtcggcggacgaagtcgccatgcttgagcaactgctcaagaaggtcctgccgtaaaaataagaagaggtaagatgatgtccagacgtaataatgacgccatcactatccatagtattttgtcgtggatcgaggataacctggaatcgcccctgtcgctggaaaaagtgtctgagcgctccggttactctaagtggcacctgcaacgtatgtttaagaaagagaccggccattccctcggccagtacatccgcagccgcaagctgacggagattgcgcagaagctcaagcagagcaatgagccaatcctgtacctggcggaacgctatggtttcgagtcgcagcagaccctgacgcgaacgttcaagaactatttcgatgttccgccccacaagtatcgcataacgaatgtacctggcgaatcccgctatctacatccgctaaataactgatgttaatcgcctgcactataaaagacgtattgaggaaatcatgaaactattcgctgccgcagctatcgtactcttgtcgctggcctccagcctcagctatgcggagcaaaacaccacgccggtgcgtcaaaaccagcgtgatacaatgattatcccttcagaacataatgattcgccgtttgatttcaatcatatggcggctggtaatgataaatctgacgaacttggcgtgccgtactaccagcagcacgacctgtgatgccattacacgcataattgtgtatagccccgtctccggggcttttttttatccgcgcgccatgccaggccgcaccaaacgtaagccaaagacattaatgtagagcccggccataatcagcaccgccccggtgagctgcagtccgctcagcgtctccccgagcagcagcgcagcgctggccattcccaccaccggcaccagcagcgacagcggcgccacccgccaggtttcataccgccccagcagcgatccccagatgccatagccgacgatagtggcgataaacgccagataaagcagcgacagtatcgttagcagatcgatgtgttgcagactcgccagcatggtctgcggaccatcgatcaacaatgaggccagcataaacggcagcaccgggatcagcgcgctccagaccaccagcgacatgattggcggccggctcgcctgggacatgattttcttgttgaaaatattgccgcaggcccagctgagcgccgccgcgagggtcagcataaagcccaccagcggcacatgctccccgccaaggctgccctccaccagcaccagcacgccaaagatcgccagggcgatccccgccagctgcttgccctgcagacgttcgccaaagacgaaggcgccaaggatgatggtgaagaaggcttgcgcctgcagcacaagggaggccagcccggccggcatacccaggccgatagcgcagaacagaaaggcgaactgaccgaaacttatggtcaggccatagcccagcagcaggcgcagcggaatagctggccgggcgacaaacagcagcgccgggaaggcgaccagcataaagcgcagccccgccagcatcagcggcggcatattgtgcaaccccagcttaatcaccacaaagttaagcccccacaccaccactaccagcagcgccagtagtccatctttcctcgtcatacccctgcctctgtcgttattggaatttttgtgaacaaaatcaaagtagcgaaaaagcggccgccgggatagatcattatttttggcaggcccggaagtgcgcccgtcgaccgcgatgacctgtacaaggcgtaatggccgtgttatttgtgatcgaagacataaaattataacaacatgacaggcaaggaaatcatgatcaccactctccggcgctccaccatcgcgctgctggcatcgtcgttactgttgactatcggccgcggggccacactgccgtttatgaccatctatctcacccgacgctttcagctggaggtggatgtgattggctatgccctgtcgctggcgctggtggttggggtgttgttcagcatgggttttggcatcctcgctgacaggttcgataaaaagcgctatatggtgtggtcagtgctggtatttattctcggcttcagcgcaataccgctggtcaataacgccctcctggtggtgatcttctttgcgctgatcaactgcgcctactcggtcttttccaccgtcctgaaagcttggttcgccgatcggctgacggcagagaaaaaagcgcgcatcttctcgctgaactacaccatcctcaacatcggctggaccgttgggccgcccatcggcaccctgctggtaatgcacagtatcaatttgccgttctggctggcggccgcctgcgccgcctttccgctggtgtttattcagctgtttcttcagcgggatggcgccgccgcggcccagccgggcgcagcgccctggtcgccttcggtgttgctgcgcgaccgggcgctgctgtggtttacctgctccgggctgctggcctccttcgtcggcggcgccttcgcctcctgtctctcgcagtatgtgctggtggtcgccagcagcgatttcgccgagaaagtggtggccgtggtgctgccggtcaacgccgcggtggtggttgctctgcagtacgcggttggccggcggctgagcgcgagaaatatccgcccgctaatgaccttcggcaccgtctgctttgtgatcggccttgtgggctttatgttctctggcgccagcctgtgggcgtgggggatctcggcggcgatcttcaccctcggggaagtgatttatgcccccggggagtatatgctgattgaccatattgccccgccggggatgaaggccagctacttctccgcccagtcgctggggtggctgggggcggcattcaacccgatgctgacggggttgatcctcacccatctgccgcactggtcgctttttgtcattcttatcgtggcgattgtcgccgcctggctgatgattttccgcgggatcaatgcccgtccctggcaaccggattctccgctggccaacgcctgacgccagctggcatgcggctgtcaggttgctgtcgggccgttgtcgggtcgctgtcgtggtggctggcggcccggttcaccatactccatcacaggtttacatccgcagaacgttatggagcatacgaatatgaacagcaacaatcaggtcaaacaattacggctgcagcgcgcctggtcccaggagcagctggccgaaatggcgggtctcagcgtccgtacgatccagcgcattgagaatggcgaacgcccggggctggagaccctcagcgccctcgccgcggtctttgaggtgacggtggccgagatcggcggcgaagcccggcgggaagacgcgccgggccaggaagcctcactggatttgcgcatagaggaagccaaagcgcgggtgcatcaggagagccgctttttccgttcgctgtcggtggcgctggtggtttgcgtgctgctggcggtgcttaaccgcttcactaatccacagtactactggtccggctgggtcgccctgatctggggcgccctgctggtggtgagaggattacgcctgttcgtgttcggcgaatggattaaaaactggcgccaggcgcgcctgcagcggctgctgcgcaaataggccgcaaaccggcggcgcgaccgccgccggcctggtcagatggtcaccatggcgcgcacgccgtcgctctccatatcaccacccttgccttgctggacgatggcgccgcgcgacatcaccaggtagtggtccgccagcccggcggcaaagtcatagaactgctccaccagcaggatcgccatgtctccgcggctcgccagctggcggatcacctcgccaatctctttgatgaccgagggctggatcccctcggtgggttcatcaaggatcagcagctgtgggcggctggccagcgcgcggccaatcgccagctgctgctgctggccgccggataagtcaccgcctcgccgctgcttcatggtcctgagcaccgggaaaagctggtagatctcctccggcacctgctgcgcttcgcgggcgggaaagcgcgacagccccatcagcaggttttcttccaccgtcaggcgcggaaatatctcgcgcccctgggggacgtaggcgaccccggcctgcacccgctggtgcggtttgcgatgggtgatgttctgatcctgccagcgtacctcaccgctgcgcgccgggatcagccccatcaggcatttcagcagcgtggtcttaccgacgccattgcgccccagcaggcaggtgacttcgccctggcgggcggaaaaatccaccccgcgtaaaatatggctgccgccgtagtattgatgtagctgactcacctgtaacattggcgctccttaacgtcccagataaacttcaatgacctgctcattggcctgtacctcccgcagcgatccctccgccagcacctggccctgatgcaggaccgtcacccggtcggcgatggtctcgacaaatcccatgtcgtgctccaccaccatcagggagtgctgtccggccagcgtgcgaaacagctccgccgtatactccgtttccgcatcggtcatgccggccgccggctcatcaagcagcagcagatgcggctcctgcaccagcagcatgccgatctcaagaaactgtttctgaccatgggacagcagaccggcctggcggtagcgctcgccgtcaagacgcagcaggcgcagcacctcattcagccgatcgtcctgttcgctgctcatccgggcgcgcaggctggcccacaccgatttatcccccttcatcgccagggcgagattttccgccaccgtcagcgcttcgaagaccgtcggcttctgaaacttgcgcccgatgccctggcgggcgatggccaccgggtcaagagtggtcagatccaccgactggtcatagagcgctttgccgctctgcggccgggtcttgccggtgatcacgtccatcagggtggtcttgcccgccccgttggggccgatcacacagcgcagttcgccgacgcctatcgccagcgacagatccgtcagcgcccggaaaccgtcaaagctgacgttgatgttctccagctgcagcaccggatcggtttgttcgcgaaagcgatcgccgggcagctggcgggtaaacagtccttcatccggttgcattagcggtctcctcgacgcagcaggcccatcaccccgcggggtaaaaacagggtcacaatgatgaagatgaggccgagaaacagctgccagtactctggcatcgccacggtgaaaatgcttttcgcaccgttgaccaatccggcgccaagcaccgggccaatcagggtgccgcgcccgccgagcgccacccagatggcggcctcgatggagttggtcggcgacatttcgctggggttgatgatccccacctgcgggacatataacgcccccgccagaccgcagagcaccgccgacagcgtccacaccagcagcttgaagccgcgcgggtcgtacccgcagaacatcagccggttttcggcgtcacgcaccgcggtgaggatccggccaaacttactctgcgccagcgccgagcccagccacagggtcagcaacagcagcaaaaccgtggccataaacaggctggcgcgggtgccggcggcggtgacaggaaagcccagcagcgtggtaaaaccggtgaagccgttattcccgccaaacccggtctcgttgcgaaagaacagcagcataccggcataggtcagggcctgggtcatgatcgagaaatagacccctttgatcttcgagcgaaaggcaaaccagccgaaaaccagggccagcagaccgggaaccagcaccaccagcgccatcgcccaggcgaaatgctgcgtgccccaccagaaccagggcagctcgctccaggagagaaaagacataaacgccggcagaccgtcgcccgccgcctggcgcatcaggtacatccccatggcgtacccgccgagggcaaagaagatcccgtgccccagcgacagcatgcccgcatagccccagaccagatccagcgccaccgccacaatggcgtagcagaggattttgccgctcagcgtcagcagccagctcggcaccgccagcggatgggaggccggcagcagcgccaggaatggcatacacagcagccccagcaccagcaggatccccagccagcgcagaggccgcggcgcgcgctgcgccagcgttaaggtgattggttggctcattagtcaataaccctccctttcagcgcgaacagaccctgcgggcgtttctgaataaacagaataatcatcaccaggatcaggattttgcccagcaccgcgcccatttgcggttcgagaattttgttgaaaatgcccagcccaaaggccgccgccacgctgccggccagctggccgacgccgcccagcaccaccaccagaaacgagtcgatgatgtatccctgacccagttcaggcccgacgttgccaagctgcgacagcgccacgccgcccagcccggcaataccggagccgaggccaaaggccagcatatccacccgcccggtaggcacgccgcagcaggcggccatcgcccggttctgcgtcacggcgcggacgttcatccccagacgggtgcggttcaggatgagccaggtaaagcacagcaccagcaggacgaacgccagcaccgccagccggttccacggcaggatcaggttcggcaggacctgcacgccgccggagagccaggccgggtttgccacctccacgttctgcgcgccaaacaacatcctcaccagctggataagcatcaggctgatcccccaggtggcgagcagcgtttccagcggccgaccatacagatgacgaataatggtgcgctccagcgccatgccgatcccggcggtcaccagaaacgccaccggcagcgcgaccagcggataaaaggccagccattgcggcgcgagctgcgccagcgcctgctgtaccagccagcagctgtaggcgccgatcattaacatctcgccatgggccatgttaatcacccccagcaggccataggtgatcgccagccccagcgcggccagcagcagcaccgagcccagcgacagccccataaaggcctggcccagcagatcgccgagcagcagacgatgtttgatcttttgcaggctatcgctggccgcctcgcgcaccgccgcatccggctcatgctgggcatcggtaaaggggatcagcagcgcctgggtttccgggtccgcggaatggccgagcagcgtcacggcggccagccgcgcgctggcctcaggctgagcgagctgcaggcgcgccagcgccacctccagcagaccccgcacattatcatcggtttccgcctgcagccgctgttgcagcagcgcggccatggccggagtcgcttcccgctgtagcgttcgtgcggcggaagctctctccgtgacattgtcacttaaaataaggtggctggccagcgcgccggcagccagattgcgcagccggttggtcagacggaccggccgggtttcgccctgcggcgcggcgacagcgcccaatggctgtaatccgccctgtcgggtgcggaaagcatgttttccgtcgtccatcaccaggctctcggtggtcaacgcccgcagcagcggcagacgatccgcctgcggcgctgccgcccactgggtcaacagctgcgcctgctggctgcgactggcggcaacgaagtcgtccgcctccgcggcctgcgcccgccatggcagcaaggtcagcaatagcgccaacacactcatgagacccaatgcgttcatgtcgttctcctctggtcagcggccgacgggcgcgacgctcccgccccgtcggccgtggcgcttactggctgacggttttcaccggatggtcaggtttcttatcattaccggggatccacggactccacggctgcgcgcgaacgggctcatcggtctgccagaccacgttgaactggccgttgccttcaatttcaccgatcatcaccggcttatgcagatggtggttggtggcatccatggtcagggtaaatccggacggcgcgttgaaggtctgcccggccatcgcctcgcgtactttgtcaacatcggtggtgcccgctttggtcaccgcctgcgcccacatatgcaggcccacccaggtcgcttccatcggatcgttggtcaccaccgtatcggcattcggcagcttgtgcgctttggcatacgcgcgataatcggcgacaaaggctttgttggtcggattatcgagggactcaaagtagttccatgccgcgaggttgccgaccagcggtttggtatcgatgccgcgcagctcctcttcccccaccgagaacgccaccaccggtacatcggtcgctttcagaccctggttagccagctctttgtagaacggtacgttggaatcgccattgatggtggagaccactgccgttttgccaccggcggcgaattttttgatattggcgacgatggtctggtaatcgctgtagccgaacggggtgtagacctcctcgatatctttgtcctggatccctttggcatgcagaaaggcgcggaggatcttgttggtggtgcgcggatagacgtagtccgtccccagcagaaagaaacgtttagcgccgccgccgtcctcgctcagcaggtattccactgccgggatagcctgctggttaggcgccgcgccggtatagaagacgttgggggacatctcttccccttcgtactgcaccgggtagaacagcaggccgttcagttcctcaaacaccggcaggaccgatttacgcgagaccgacgtccagcagccaaacaccaccgccactttatcctgggccagcagctggcgcgccttctcggcaaacagcggccagttggaggccgggtcgaccaccaccggctccagtttcttgcccagcaccccgcctttggcgttgatgtcgtcgatggccatcagcgcgacgtctttcagcggcgtttcggaaatcgccatcgtcccggagagcgaatgcatgatcccgactttgatggtgtcggcggcataggcctggaaggagagacccatagccataacagaggcggagagtgcaaaagcttttaataacgttctacgttgcatgattcactcctgagtagcgcaaaaaataaagaattaacagctaaccagaggtgataaggcataaaaggtgccaggttgtgaaaacagcaggatgcggcgcaggtgggcgatagtggcgaagaggatggcagcgttgcctcatcacggtgcaacgctgcgctaagaaagcaattaccagacgtcggcggcgatggaggtcaccagacggaccttttgccattgctggtcttcgctgagggcattcccctcttcagtggaggcgaaaccgcactgcggactgaggcagatctgctcgagcggcacgtactgcgcggcctcggcgagacgcgcttttaccccctgcggattctccagctcgccgtttttggtggtgatcagcccgaggaccacctgctgatggccgggacgaataaagcgcagcggcgcgaaatccccggagcggtcgttgtcgtactccaggaagaaggcatcgacattaacgccgccaaacagcacctcggcaaccggctcgtaaccgccttccgagatccaggttgaacggaagttaccccggcagacgtgcaggcccaccgtcagatcggccggcttaccctccagcgcctggttcagcacccgggcataaatacgcgccagcgcatccggatcctcgccgcgctcgcgtacctgctggcgctgggcatcggagcacagataggcccacacggtatcgtccagctgcagatagcggcagccggcgtcataaaacgcgcggatggcgtcgcgccaggtggtggccagatcgtcgaagtagtcgctaagatccgggtagaccgtggcatcgatatctttccgcccgccgcggaagtgcagcacgctcgggctgggaatggtcatcttcggctgcgcgtcgccgctgatgcttttccgatagcggaaatcctccagcatcgggtggtcgccaaacgccagcttgccggtgacgcgaacgccgtgcgctttggtctgcacgccgttgaactggatcccctgctcggcatcgtaacgttcaacgccctgcaggccatcgaagaaatcgaaatgccaccatgcgcgacgaaactcaccgtcggtgaccacatgcaggccgcagtcgcattgctgctgaaccagatgacggatcgcgttattctcaatctcgcgtagctgagcggcgtcgataatcccctcagccagctgctgacgcgcctgtttaatgctgtccgggcgcaaaaaactgccgacgatgtctgcgcggaacggggcctgttgacgttgcatgctgtctccttagcggtgggcgcgttagttgcccaccgtgatagttcattatttgaattttagacttctggatggctatatgtccagatactggcatgcagagtggtgggtcgcaaacgagaatatttcatggtacatgaaaaattttcatttaccggaaacaaacgcatagccctcatcttcccagccggtgagtccgccgagcatcattttcaccggccgccccagctcggccagcttcagcgcggcaacgtcagcaccgttgcagtgcggcccggcgcagtagaccacaaagagggtctccgccggccaggccgccattcgctcggcggtgatctggctgtgcgggagatgctgcgcgcctggcaggtgacgtctggcgaaggcttcctcgctgccgaccacgtgcagcaggacaaagtcgacctcgccggcacgctgggcgctgtgcacatcggcgcagtcggtctcaagatgcagcttatggctgaaccagcggatagcctcagcggaggtggcgggggtaaattgggttactacactcatggcgtcttctccttgtctgtgataacactactttactgacgcccatcaccctgatctgccgacaaccatgacagaaaacgctaacatcctgacaaccccttctgtgacaccgtcacgtcatcaggtggtcgccctcgcctacgatggcctgtgcacctttgagtttggcgtagccgtggagatcttcggcctgccgcgcccggaaatgggcgacaactggtatcagttcgccgtcgccgccgtcgatgaagggccgctgtgcgctaccggcggcatccgcctgatgaccgacggcggtcctgaacttctcgcccaggcggatacgattgtggtccccggctggcgcggcgtcgacgccccggtccccgaggcgctgtgcgccgcgctggcttccgcccacgcccgcggatgtcggattatttctatctgttccggggtgttcgttctcgccgccgccgggctgctcaatggccgccaggcgacaacccactggcgctacactgcggcgctgcagtcccgttttccgcagatccaggtggtggaggacgtcctttacgtgggcgatgctttgctgatgacttccgccggcagcgcggcggggatcgacctttgtctgcatctggtgcgcgaagatttcggcagcgaagccgccaacgtcgtcgcccgccgcctggtcgtctctccccatcgcgacggcggtcaggcgcagcaggtcctgcgcccggtagcccgcagccgggagagcctgcgcctcggtcagctgtttgactatctgcaccagcatcttgccgccagccataccgtcgcttccctcgcccagcgcgccggcatggggacgcgcacctttttgcgccgctttgaggaggccaccggtaaaacgcccgcccgctggctgctggaggaacgactgctgcgcgcccgccagcacctgacggagagcacgatgggcatcgatcagatcgctgagcgctgcgggtttgccagcgccggcaccctgcgccaccattttcgccagcacttcgcgctcagcccgctgcagtaccgtaaacagtttacgccttctccgattgcaaaatcgtcgcagccacggacaatagacggccacagtaaaccggtcgccaggagggtcgatgatgaagaaagagtgtcgggtagtgatctataaagaggggctgctgggcagtctgttttttggcgaagccaaggccgaccctgacaaaatgagccagtttctcagcagctatacccgtgagggatgggaagtgaaaaccatgtcggtggagcgccgccgtaccgccctgttctggtcgcgggaagcgtatcttttcgtgctcgaacgccccctctgacagcctgcgcctggtttacacgtttaagccaggcgtttctaagcgtcacctttcagggctgacggatatagccctgctcctgcattttctgcatgccttcctcgctggcgcagaccatgccggtagtcaacatggcaaagccaaagcgctgataaaacgtaattttatcggccaccgcatagataaatattttgccaaagggcaggagttgctcccggatggccagcatcagctgttgcccgtagccctgtccctgacgagcggggacgatcgccacatccgccagatagctgctccaggtgcagtcgctgatggctcgcgccacggcaatcagctgaccgttctcatagccaaaccagcagaaggtgctctggcggaacgcctgctccagttgctgaacatcacgctcattcagcccggcctcggcgatgatcgttcgcactcgctgccagtccacccgcacgatcgcctctttaccctcaatcaccatcatgaccttgtctcccgtcgtctcccggaagcaagatctagcatgccgcggcaggatatgccagatggaaagccggactgaagcagtcggtacagggtggaaggggcaaaaaaaaaccgccatatgactggcggtaaatcaatgcttgcatggatagattgtgttttgcatttttcgcagacagataagctttacctctctacgtttgctgccgaagttagcatgctcaacttcaataaagcctcaacgaccagcagctaaagcttctccaccagcgctttcagctgcgccagggtctgctgccggtcctccgcggcggcgacaggccaggccgactggcgcacgatgagccgggtcggcagcagctcgcggatccgcagctgcggggccgccatcagggcaatcagccgctccaccgcccttttgcccaacagatcgaagtcctgcgccaccgtggtgagcggcggctggaagtaaaggctgtcggcggtgtcatcgtagccggtcaccgataccgcctggctgccgctgcgattgagctgggccagcgcgctgagcacgccgagcgccatctgatcgtttgccaccactatggcgctgatccgcggctgcaggtggaggagctcgaaagttttctgccaaccgctggcggcgctccagtcgccaaacaccgtagtagagcgggcaatattcagactgtgcaacgcctcgcgccagctggcgagacgcagacgggcggaaaccgaactttccggtcccgccagcagaccaaattcgcgatgccccagctcccacaggtggcgcacgcaggccccgcagccgtcgcggtggtcgaagcgcacgcagcagacatcggcctccggggagacatcgagaaacaggcaggccatatccggattgtcttgcccctgtcccctctacacatctgacgctgccgccgaccggtcgagagcagatgtcggtggcgccagcgtcgcaatcacaagaa

SEQ ID NO: 191 - DNA, 21347 bp, Unknown
  source: /note="Description of Unknown: MKP2_2161_1 Mutant Bacteria sequence"
ttctttttttacctcttgtcttcctctcctcgtgtatctgagttcctgtattttcctgttgtcctgcctcgtccgtcccacccacgctctcgcattcatgtactctccgtacttcatcgctgagtgatctctgccccttctgttcgtttttttttttttttttttttttttttttcaagcagaagacggcatacgatatcctctctggtctcgtgggctcggagatgtgtataagagacaggtatcggcctggcgccggtggtgctggcgcatcagtcgcgggtggcgctgggagatgatattggcgaaaccctgaaagcccgcgcggtggcgatcctgattggcgaacgaccgggtctctcctcgccggacagcctcggcgtctacctcacctggcagcctcatcgtcagcgtctggagtctgagcgcaactgtatctccaatattcggccggagggattaagccatgacgccgccgcctttaaactggcctggctgctggagcaggcttttttgcgtcggcttaccggggtgggtctgaaagatgaaagcgataatccggcgctgcatggtaaaataaaaccgttgccccctttaaaataataagtcacgcgagcagcagaatagatttttaatattatcttgtgcacctgactttatattccgccgcgtgctgaaattgcccggcggcgcttcgctggtacgggtctacggaagccgtgccagcggtttatatggcgtatttttcaggccgggtaaggcgccagtcgccccccggcaaaatgctttcaccgtaccaaaaaccgtgttgtcgccagccttatgcccttccctgcaggtaataagaatattgcatgagtaaaaacgaaacggacgttgtaaggtaaatcagcgcattaaaaatacccgtcatacttcaagttgcatgtgcgttggctgcattctctcccccagtcacttacttctgtaagcgtctggggactcgcttacttgccgccttcatgcgactcgaattatttagggtatatatctcgttatctattcaacataacagccaataattcgccggatacgctggcgcattattcctcaatgttatgcagtcattgatggttaaagataaataatcgaccgacggagaaatacccatgaaatcgttttccgggaaagcgtctttaatggccacgctggttgccgcgctggtcggcgccagcagcgcgcaggcagcggaaattaaaatcggggtggtattacccctgagcggcgccctcagcggctatggccagccgtcgcagaaagggctggacattattcaggccatcaccccaacgttaaaaaatggcgataccatcaagcttatcgttatcgatgataaaagcgacaaagtcgaagcggccaacgccatgcagcgcctggtctccagcgataaagtggatgccgtgatcggggaagtcacctcctccaacaccctggcgatgaccaaaatcgccgacgacagcaaaacgccgctggtctcctccaccgccaccaacgaccgcgtcacccgcaaccatccctacgtcagccgggtctgcttctcggacagcttccagggggtggtcggggccaatctggcctcccgcgatctgaaagccaaaaccgccgccatcgtgtttgacagcagcaacgactactccgtcggcctggcgaaagcgttccgcacccagttcctgaaaaacggcggcaccattcccatcgaggtccaggctccgggcggcagcaaggactttaaagcccagttggcgagcgtcaaggcgaagaatgtcgacatgatttacatgccgatctactacaccgaaggggcgctgattgccgtgcagtctaaacaactggggctcaacaaaccggtggtgggcggcgacggtctggccgcggatcaggtcttcttcgatgtcggtaaagacgcggtcaacggctatatgaccaccgattactactcgccgaacgccaaagagcagaccccggcgggggaaaccttcatcaaagcctgggaagccaaataccagcagccgacccatacctggggcgcaatggcggcggacgcctataacgtcatcgtcaacgccatgaaccagtgcagcgatccccacgatcgggtctgcgtgaatgaaaaaatccgcgccaccaaagatttccagggggtgaccggcacgctgacgttacagaacggcgacgccattcgcagcgcggtcatcaacgaagtgaaagatggcaagctggcgtttcgtaccgtggttaacccttaagttgtgacgaggctacaaaatggacggcgccatttttctccagcaagtggtcaatggaatgagtcttgggggcatgtacgccctgattgccatcggttatacgatggtttatggcgtgctgcggctgatcaacttcgcccatgcggacgtgatgatggtcggcgcgtttagtacgctgtttttattttcttcggttgggctacccttcggggtagccgttttcctgaccctcgggctgtgcggcctgtttggtatgctgattgaccgggtcgcctatcgtccgctgcgtcaggcctcgaaaatctccatgctgatcactgccatcggcgtcagcttttttctcgaaaacctgtttaacgtactgtttggcggcagctcgcgcttcttctccgcccctgactttttcaaccagacccgggccttcggcagcgtcatcattaccaacgtggcgtggattgtgccgctgatcaccgtcctgctgctgctggcgatcctctggctgctgtaccgcacccgctatgggatggcgatccgcgcggtggcctttgacgtcaacaccgtgcgcctgatgggcattgacgccaaccggatcatctccctggtcttcgccctcggcagtagtctcgcggcgctcggcggcgtgttctactccatcagctacccgacgatcgatcccctgatgggcgtgcttatcggcctgaaggccttcgccgccgccgtgctgggcgggatcggcagcgtcaccggcgcggtgctgggcggctttatcctcggttttaccgaggtggtcgccgtggcgatcttccccgaactgggcggctataaagacgctttcgccttcctgttcttgattctggtcctcttgttccgcccggtcggcattatgggcgacgaacgtctggaaaggagccgtttctgatgctcaacgcgacgacgaccgccggggcgcagctgcgcaacctggccattattgtcatctgtatcgcgctgctggccggaatcaacgtggttttcaatgactacattgttcgtgtcatcagcaccatttttatctttatgatcctcgcggtcagctacaacctgatcaacggcgtgaccggccagctgtcgctggagccgaacggcttcgtggcggtgggcgcctacgtgaccgccctgctgatcctctccagcgacagcaaggtagacatgtttgaaatggccgcccccagcccgtggatcctcagcctgcacgcgggcttcctccccgccctgctgataagcggcctgtgcgcggcggcgctggcggtgtgcctcgccgtgccggtcttccgggtacgtggcgactacctggccattgtcaccctcggctttgggtttatcatcaagatcctcgccattaacaacccgcaaatcaccaacggcgccatcgggctgaacgatattccgcagcagccgcatctcctgttctggtgcgggctgttcgccctgctggccaccggcatgatcctccagctggtgtggtcgaagtatggccggatgatgaaagctattcgcgacgatgaagatgcggcgatcgccatgggggtcaacaccttccgcattaaaacctgcgccttcgccaccagcgccttcttcgaagggatcggcggcggtctgctggcttccctgctgaccaccatttccccggggctgttcgactttatgctcaccttccagctgctgattattatcgtcctcggcgggctcggcagcaccaccggcgccctgctcggcaccgtgctggtggtcggcagcggcgagtggctgcgcttcctcgatcagccgctgcagttcttcggtcacgatctcggcgcgtacccgggcctgcgaatggtggtcttctccctgctgttgctgatcatcatgctcttcgcccgcgaggggctgttggggaaaaaagagatttggcagaccggaagaaggagcggcggctatggcggaaaataacgttatcctgcaggtgcaggacgtcaccatgcaattcggcggcctgcgggccatcgacaacgtcagcttccatgttgacgaggcggagatctttggccttatcggccctaacggcgcgggcaaaacaaccctgtttaacgtcattaccgccaactataaacccaccagcggcagcgtcaccctggcgggcacgtcgctgaaggggctgaagcccaaccaggtggtgaacgccgggatcgcccgcaccttccagaatatccgcctgtttaactccatgacggtgctggagaacgtgatggtcggactcgaccgcgccagccgctattcgctgctggaggcggccctgcatattggtcgctactttccggccgagcgggcggcgaaagccaaagcgatggccatcctggaggatatcggcatcgcccacttcgcccatatgcaggccacaaacctaagctatggcaaccagcgcaaagtggagatcgcccgcgcgctggccaccgcgccgaagctgctcctgctcgatgagccggccgccgggatgaacccgaaggagaccgaggatctggcggagctgatcttccgcatgcgccatgactatcagctcagcgtcctgttaatcgagcacgatatgcccttcgtcaaccgcctgtgcgagcgggtgatggttctggagtacggtaagccgttgttcagcggcctgatggccgaggcgatccagcatccggacgtcatttccgcttatctgggagaagccaattatgcttaacgcccgggaactgaaggtcttttacggcgtgatccagggtctgaagggcgtcgatatcgacgtctatgaccgggaaatcgtcaccctgatcggcagcaatggcgccggtaaaacctccaccctgaacgggatcgtcaacctggtgcgctccagtgggcgcgtcagcttcctcaacgacgatatctcacgcagccagacccaccagatcgtgcgtcgcgggctggcgctggtgccggagggacggcgcgtctttaccaacctgaccatcgaagagaacctgcgcatgggcgcttacaataatctcgccggctacgcccgcctgcgcgatcgcatgtacgccctctttccgcggctcaaggagcggcgccatcagatggcgggcaccatgagcggcggcgagcagcagatgctggccatcgcccgggcgctgatgagcgagccggtgttattgatgctggatgaaccgagcctcgggctggcgccgaaaattgtcggcgagctgttcggcatcattaagcaactgcgcgaagagaatatgacggtgctgctggtggagcagaatgcgacggccgcgctggcgatcgccgatcgggcgtatgtcctggagaatggccggatcaccttgtcaggcgcggcgcgggagatgctgactaatccggaaattaagcggatgtatctggggggataggcatggtcaaaactgcctgggctgcggcggcgcctcctgcaaggccgcaacctcaggcagtctcttgctacacaaagcacacctcgttccagtaggcttctcgcgtcctgcgtcgctcagtatgtcttatcatgacggaaccaccgggtttccacgttgccaatgtccacgccgtagaggctggctaccggcaggatcgcctccatgacgcgctgggtatcctgctgtccggcttcaccgttggacaaaaaagccagccagcccgttaaccgttgccacaatgccactttcgttttctcctctgtcgggaagcgaatcgcctgggtctatttcaaccacagttggccgggcgcgggaaatattaattccgaatttgcaatcctggctggcgcatattacccccggtcctatcaccctctccctggccctctccctgagggagaggggaccgcccggcagtcgttgccgtcctggtaaaacgccagcggcgcataaagaatacccataggtttgttaagttctttttggttatagataagaattttttcttctttgccgccgacgggcaatttgtgggagcgtgatgtccacaaaacaaaacagggattcaggggaaaaactatgcgcaataaaaccacaaaaatcgcactggcgctgggtatgctgctgctcgcctcgcaggcacaggcggaccagctggctgacatcaaagccgccggcgtcgtaaaagtcgccaccttcgacgccaacccgccgttcggctccgtggacgccaaaacccaccatatcgtcggctacgacgtcgactttgcccaggcgctggcgaaagcgctcggcgtcaaactcgagctggtggccaccaacccggccaaccgtattccgctgctgcagtccggtaaagccgacctgatcgtcgccgacattaccatcaccccggagcgggcccaggttattgatttctcaacgccgtatttcgtcaccggccagcagttcctcgtgccggccggctctccggataagctcgatgagtacagcaaagcgcgcatcggcgcggtgaaaggcaccaccggcgaacaggccctgcaccagcgtttcccgcaggctcgcgtcctctcctatgacgatattccgctggccctgaccgccctgcgcaacggcaacgtccaggccatcacccaggacagcaccatcctcgccggtctgctggcggaagcgccggataaagccaagtttaaaattctgcccgacctgctcagcaaagaagagattggcgtgggcgtgaagaaaggcgaaccggccctgctgaaggccgtcaacgatgagctggtgaagctggagaaaaccggcgaagccgcgaaaatttacgatgtctggtttggccctgccactaaaacgccgcagccgcgcgcctttaccatagaagcgaaataatatgttctcgggtttactctcccactccgcggctccggccgcggatttttcacgtctgcagcgcgccagcattacgttccgtgatgtggccaagcgctacggcgatcatcaggtacttaacgccatcaacctacaggtccagcccggcgaagtagtggcgatcctcggcccttccggatcgggaaaatcgacgctgatccgcttgatcaaccagctcgaatccttaagcggcggcgagatcctgatcgacggcaaacccaccagccggctgagcggcagcgccttgcgccagctgcgcagccgcgtcggctttgtcttccagcagttcaacctttacgcccacctgacggcgcaggagaacatcactctggcgctggagcgcgttcatggctgggaaaaaagcgcggctcaggcgcgggcgctggcgctgctgcgtcaggtcggactggaagaaaaagcgcagcagatgccggcgcagctctccggcggccagcagcagcgggtggccatcgcccgcgccctggcctcctcgccgcagattatcctgttcgatgagcccacctcggcgctcgacccggagatgatcggcgaagtgctgcaggtgatgaaaaccctcgcccacagcgggatcaccatgctggtggtgacccacgagatgcagtttgcccgcgaaattgccgaccgggtggtgtttatcgacggcggcgacatcctcgaagtcgccccgccggctgagtttttcgcccatccgcagcatgcccgcgcgcggcgttttctgcagaaggtgctggatccgctgcaccaggagagcctcgagtgacgccgatgcttgactggcacggcgtcctgagcgggcagccgttgcaatggattatctctggttttctcaccaccgtctgggtcagcgtcgccgggatcctgctcgccaccctgctggcggtcctgctgctggccctgcgcctcggcggcggacgcgcggggcgcggactggtggccgcgtgggtctcgttgtttcgcaacactccgctgctggtccagctgctgttctggtactttgccgcctggaacctgctgccgctggcggtgaaggaggtggtgaacgacgaacacgcctggtccattttgccgggtaacgtctggtggctgacgccggagttcctctgctcgatgtgggggctgggggtctttacctccgcctttctggtggaagagatcgcctccggactgcgcgccgtcagccacgggcagcgggaagccgcgctgtcgcagggctttacgccgtggcaggagctgcgctttatcctcctgccgcaggggctggccaacgcctggcagccgattgtcggccagtatcttaacctgatgaaactctcatcgctggccagcggcatcggctttgcggaactgacctatcaggtgcggcagattgagagctataacgcgcacgccctggaggcgtttgccgtcggcaccgcgctgtacctggcgctgggggtggcgatgggcgtggcgctcacgcgtctcggcccgggaagaaaactgcaacggagcgcccgacatgaacgctaatctggcggtgatcgccgataacctcgattacctgctgtggggccgactggcggagggccagcccggcggcgtggcgctgaccctgctgatggccatcggcgccaccctgctggcgctgccgggaggcattgcgctggcgggcctggcctggcgctacggcgggctggtgcggcgtctgctgtttctgtgggcggaaattatccgcggcatcccgctgatatttgtcatcttctggctgtggtatctgctgccgatgctgaccggcggcgatctgcccggcgcggtgaccgtgaccctggcgctggcgtggtttaccgccgcctcggtgatgcactcggtgctggccgggctgcagtcgctgccgaaaggacagtatgaggcggcgctgacccaggggttcgctcccgggcaaacgctgcgcctggtgctgctcccgcaggcgctgcgcaacgttcagccgtcgctggtggggatctttatcggcctgctgaaggacacttcgctggcgtttatcgtcaacgtcccggagctgaccaccgtggccggccaggtcaacaaccgggtgcagatctatcccctggcgatcttcgtcttcaccggcgcggtgtactacctgctgtgctgcggtctgagcctgctggccagccggcgctttacccgccgcgcgaccaccagataaggctcactccgcgggacggggcttcagcggacaggtatcgctgatcttaataaatttgtcgttatagaccagatagtggttccccggctggcgcagcgccggctggcgaaccacgtccccgggacgcagataccacgcgtcgccctcctcttcggtcgaatcgcacccgggtttaatcagcagcttaaaccaggtattgccggtgttgctcaccgtcccggccgccttatcgaaagaccatttaaactgtacctgccgcgggcgcaccaccaggatggtatccatcaccaccactggctccatgctgacttcgccgccggtcgggctgcgcctcgtcaggttacgggtgggaatttcacgaaacgagacccgatagtagcgctcgcggttatcccgcggcccatgataataaaatttgaaatattcgctctccccggcctgcagcgccagctggcggggggcgaacagcagttcgccatccaccggccgggagcgcacttcgctgccgccagggcggtcgatggcgctgacagtgatccggtacagccgcgcgcttttattgttattgaccacccgtttgctggcgaaatccgcttcagccggcagggaaaaggtcagattgccgaccgagatcgcctgcgccagcggcgccgccagcaggcagctcagcgtcagcagggccttagttaatgttgcgccacgtcgcctggacatgaatctctcctgaagcgctgacttcgccaaaccagccgttatcgtctaccgtccgcagcgaaatggcgttatccatcggaatcgaaaatttcaccgtggtcttatccatctgccccacttcgccggagatatcggtccacggcgtggtcagccacagcgcatcggtcatatcccgccagctgtcatcgcacccggcgtcgtaggtctgcgtcgcgccgctgcgggtgataaaagagagcgtcgccgggaacggcactttcgccgtaccgtcatcggagctgaagagacagtaggagcgcccaccaatcacctgcgccggtccggtcactttgatcagcacttcgtcggcggccgttttaccgctggtggtgacgatgtagccgaaatcgagcgccggttcaccactgccgacatacccctcccgcgacggcgccgaggtatattcgtcagagataatgctgatgctgaaatcacggggcttgataatcagcgtattggaggtggaaaactcataccagcctgactccggcgaggtggtgttctggaagcgaaagttgaacaaatccttggtattgatatcgctgatcccgagattcaccatctgcttaaagaagttactggagaagaacacatagatcgcatctgagctcttcatctcattgaaggtgtagtaataggcggtattgctcaccggcttccatgagctgccgttgaggctgaactgcatatcatacgccccgacggccgaggccagcgacgagttggcgatcgccgggaaaatatggatcgacgtattgcttaacccattggtctgcaaggtataatttaccatcttacagcttaatcctgaacggctgccaatggtctgtgtccggcagtcggcgttcccttccccaagggttggcacgccatcgctgttgataaacacctccgccagcgagtgggtgtttatcaaccgcaggttcgcggctttggtgtgggtgacgttgcgcacataccagttgccggaggcctgatccttacagcgcgcgccgctgctggcgtcgtagttcaccgaggtctggcaggcattgatggtcatcgtgaagctgccgccgaccggcatctgttgcagatactgataaaacgcgtccgacatcataccgtgcatccacttcgcgccgccgctggtcaccgtcgcgccatagaacccgctggcgtcggtggtctgcggcaggatcaggctggtggccatatcgcacccggcgtaccagttgatgcagcgcaggccggttaaggggtgcgaaaccggcgagttttccagccacatatcaaacttccagttggcattaagcccggtgttgtagccgttatcgatatagccgagactctgctgatagatggtcccggagccggtgtattttaagccggtccagcggttggcgccggtcatgcgcggatccagcgccccgccgggagtgacgaaaaagttgtcgtcggagttgttttccacaaacacaaactcgcgcgccggcgcatccgaccaggtggtcttggtcaccgccgccctgagcgcggctgccggccagagcagcgcgaggatcgccagcgccatcagtgcattaactttcattctcttctcctgactgctgcaccgccgcccacgacgagaggccgctgcagaccacatccccgacccagacggcgccgcgcgcctggctgagctcgagcgccacttcgcaggttttattgccgccgtagctgaaatcgatagtggggtatttcttatccacgtccatgacaaactcgccgttttcatcggtgcgggtacggccgatatggttgttaatccgcgcattcgccagcagcgtgccgtcttctgcacgaatacggccggagacggtgaccatctgcttcacctctggctcaatcaccgcgacgttgcccggataaagggtcagatgactcttgcgcccgctgacgatgtcgtagctgtcgagcgagtttttgctgttctgcagctccacctcatagcgaccatagggagagagcggcaggtagttacgcttgccgctgagcgggaagatccgcccgttaaccctggcgctaatctgaccatcgtcctccagcccggtgttgaagatcaccccggcgttgccgtcggttcgtccgctggcggcgatatttttaccctgccagccgacgctgccgctggcggtgaggttggtgttgacgtagccgtccgccgcgctgttgacgttcagcgtgccgctggcgtagcgggcgtcgaactgggcatacgcgccgccgctgagggttttgtcatccccggtatcgccggagatggcccgcgacagattggcgccgatggtgcgaatagtgccttcatcaaactgcttgcgcgctgagaggttagccatggtgtagccgttctgatgggtcatcccggcgctgaaccagttgcccagcggcagcgacagatcgagggcgatatatttcccggtgttggcgctgctgtcgccattgttatagcgctggatccccgcccgcaggccgagcgagccaaaggcgccgctgtagaccgtctgatagtaatccgcggtgtagtaatggctgttgtagcgacggtcatcgttgtagctgacgctgaacgtccccagcttcgaccacagcgcgttcaggttgagggtgccgccgatcgcccggttgtcggcatcgctgcgccgcaattgatcgccaatgcgggttctctcctggttaacccacactgaactgaatcccccgggcaacgtggcgctgatgctgccgacgctgctccacgagctgtcgctggccagcatgttttgcaggttaacgttgatcgactcgcccagcggtagcgtcaggcgggtttcccccaccgcctggttgtcgtagccatagcccgtagccgcccagctcagggtgctgagcgacccggaggccgaaaggcctgccagccagctctctttcgccggccgggtctttttcccgctctctgaccagcgatccatatgaaaactgccgccccatacctgccacgccagcggcgcgccggcgccgcgtccccggctgaacagcttattgacccgctgggtgcgtttgctgaccacccgaccattgacgatcacctccacttccacgtcgtaaataccgtacggcaggccgcgggtatccacttcatggttgcccatggcgaagttctggacgctcagcaaccgaccgtcacgggtgagatgcacctcgcccgccgccggcagaaaggcgatcaccggcgtggcggactggctgttgtcgaagacggtggagctggcctggttcccccaggaaaggccgtaaatcttaccggccgaaatagcggtcatcggtcccagggactgcaggttccaggtgtcaagcatcccgccggcaaagcggtggccggcgaaatcgcgctcatacatggccttatataattcactgtcctgctgaccgctgccgatgccgtatagcgagccgtcgagcaccacgtgatgctcacgcagcgccgtgacgttgttcagcgacaggtagctggaggtgttgctcccgccgttacgcatctggttgttatagacgccgaggttatagctcaggttgctgctgagagcgttgacgctggactgaccgatatcttcgctgcgcgagcgcaggacggtgcccagcgcctcgcgcttgaccaccagctgcagcagcagctggcgcaggctgagatccagctgtgcgctgtcggtcaggggaatggtgagcgcctcgctgaacggggcgttggccaggccaatcagctgctggcgggtctgttcgctaacgctggcgttaccttcactctcctccagctggatctgccggacgcgcagctggccgccgtccagccagataaaggcgctgccgatccgctgatcgtcccggctgctctggctgccggcgagatgaatatagagcgggacgctcatgccgtcctgcagcgcctgactgaaggcctgcggaataatcaccccgccaatctgctgcgcgcctgcggcagcagcgctgacgtcgggctgaacgaacaaaaagatcatgccgaaggcaagccgcgttttcagtcctggggtaatccatcgttgaggcatcgtcgttatccatctgcacagctgtctatttcacgggaacaaactgctcaccctgccaaagcgccacccgtccttttttatccgccgtgtccacgcgcgtaaaacggcgcgatttacccggcatcaggtagtaattctctttacattccttaccatcggcggccttcaggcaggggccgtaggcgaggatccgcagcgtcgcattcccggtgttggtcagagagccgttggcgtactgaaagcgatagttcacctgccggggcgccaccaccaggatggtgccgatgcgagcggaagcagtggccaccgcgctgcggttggcattatcgcgttgggcatcgctgagcgcctgatcgaaccagacaatgcggtagtagcgctctttgtcatccgccgggcctttgtagaagaagcggatcacatcgctggcctgggcgggaagcagcaggctggcgggagtgagcaatacctcatccggtttgtccattgggataacctgcccgccgtccagcggggaagagagccgttcgagatggatattgatcagtcgaccgctgtctgtactgttcttgatcgttttgctcagcgtgctgctgccgctgttcataaaggatgaaatatcgccgacatccagcgcctgcgccggcgacaccccggcaagcagcagcccgagggccagaaggtgctttttcataacaattccgtccgggaaaaaagcagggggagatccccctgctggtgcatcagaaggatcagctggtccaggtggcgtcgaactgtacgctgacgtcgccgctccagatcccttccggcagggtgctgtaatcggtcacggcggtggtgccgttggtggtgccgctgatgatggagaaagtgaaaccatcctgcgcggtggtacggccgctggcgttgtagccattagccaacgcgctgaggttgccgcccataatattgttggcggtatcgatcatcacggtatcgccagttttttccaccgcggcgccgttataatccacgcccacgctcagcgtggagccggaggtatccagctgggttaaggtgttggtgataagacgcgaggtcagcttaaaggcggtcgccgttgtgtccccctcaatcgccacgtcaaacagacctttctgcgagttaaagcctttaatgccttcggcgtactggaacgccaggctgccgagcggggtcacaaccagcttgctggtggtgtcttttttagcggtcgcagaccaggtcgctacagcctgagccgttacgtcagcagcctgcgccacgcccataccggtaaacgccgttaccagagctattgccagaaccttttttttcatcgctttttcatcctgagttgaattaaggacatgatgtcccggtgaaccatttaaaaaacagaattgcctgggtgttactgaactaacttatatattttggaatacagtttggcctcagcattacgccgatgggtatacactgtcttcacgctacaattttcaattctggcgatcgatttcggctgcatgccctgggcggtcatgcggataattttcatttcccgatctgtaattttatctttcttaatatctttgcggagaaacctgccattaattacataggccagttcttttcgaatatcgcgactcagaccaacatataccacgccgcgaatatcgctattgtaataccagtagttcgctaaggcctctgatttcctggccgcaatcaatacgacctgtttcccctttaccgcggatagccattcgctgtcgcgcctgataaattcgtttaatgaagccgtattgagattgataaacacaaaatcttttctgattttctccagtgagagataaattaattcgtcgatgtctacaatcagttcggacagtcctttatagaaataggagtcatcggcagaccaaatatacttatcggaacagcttttatattccatatagtttttaacctcatagtccttgaagtaatcatttttacaacgtcactgcttgccaggcctataaagtttactggcgtattcgtttcctttaataaatcgccattaaataagacacgcattacttatcaatattggataagcgggggattaaactataattattttctgcttggcgttgaatttaagttttttcctatggagtgtcaacatgcggaaaggcaatgaatttcgcgcccaggtcaatatttacaaaaactgaaaatatcaaatttttgagcgccagaaaaagacatttattttcataaggttattggtaatataaccgtcaattcttatctgcgctttatattatccaggatcttcgccctattatgttaggaatattcttaatggaactcttgaatggcttatcaaataaaccggatttagcacaaaagaaaggatataaatctacaaataaacaaaaaccaggatgattcaccaacacataagactcatgaatagattaacctgccgcacaaaatagttatgtatatgttaatacatgcgggatgttgaatgctaaacaaaggcagacgcattatctattcgattaaacggtcttcttcatcaagattaagcgaagattgccgaaggctgcctacgcctacgaaccggtctgtctccgcgccctccaaagcatagcggcttttcggcgcttcgccagccgccagcatgccgcacgcgttgagccgctggccgtcgctctttcacgccagttcacgctttgttcgcaataccgtcatcgaaatttcatataaagacctattaatagtggccagttaatgacgaacctggacactcttatgaacagccctcttgccgcggtggccgaaactgatttccagccgttcaccgatcccgctgccggccggcagcggaaggtcttaagcgtgcgtaatctgagtaaagcttatcaagcccagcacaaggtgctggacggcatcagctttgatctgcacgccggggaaatggtcggggtcattggccgctccggcgccggtaaatcgacgctcctgcatgtcctcaacggcacccacagcgccagcggcggagaaattcttagctacccggaagtcggtaccccgcacgatgtctcacagctgaaaggccgtgcgctcaatgtctggcgtagccactgcggaatgatttttcaggacttctgcctggtgccgcgcctcgacgtgctcaccaacgtcctgctgggccgcctcagccagacttcaaccctgaaatcgctgtttaaaatctttcccgcagccgaccgggcgcgcgccattgcgctgcttgagtggatgaacatgctgccgcacgcgctgcagcgggcggagaacctctccggcgggcagatgcagcgggtggcgatctgccgggcgctaatgcaaaaccccgggatcctgctggccgacgagcctgtcgcctcgctggatccgaaaaacactcagcgcatcatggatgtgctgcgcgaaattagcgagcagggcatcagcgtgatggtaaacctgcattcggtagagctggtcagggcctactgcacccgggttatcggcgtcgccagcggccagcttatttttgacgatcacccctcccggctgacgcaggatgtgctgcagcggctgtacggcgatgaagttagccaattgcattaatttcactcacacgggcaacataatgaaaaaatatatgactggcgcagttcgtttatccgcaatggtcgcgggcatgatgatggcatggcaggcagcggcggcgcagccgaaagagctcaatctgggcattctcggcggccagaacgccacccagcaaatcggcgataaccagtgcgtgaaggccttcctcgataaagagctgaacgtggataccaaactgcgcaactcttccgactattccggggtgatccagggcctgttggggggcaaagtcgacgtggtgctgagcatgtccccctcctcctacgcctcggtttatctcaataatccgaaagcggtggatatcgtcggcatcgccgtggacgacaaagatcagtctcgcggctctcactcggtggtgattgtcaaagccgactccccgtacaaaacgctggacgatttaaaaggcaaagccttcggcttcgccgatccggattccacttccgggtatctgatccctaaccatgcgtttaaagaaaaatttggcggtaacgccgacaacaaatacaacaacaccttctccagcgtcaccttctccggcggccatgagcaggacatcctcggcgtgctgaatggccagttcgcgggcgcggtcacgtgggcctcgatggttggcgattacaacaccggctacactaccggcgcgttcaaccgcctgattcgcatggatcatccggatctgatgaagcagatccgcattatctggcaatcgccgctgatcccgaacggcccgatcctggtgagcaatgcgctgccggcggactttaaggcgaaggtcgtggcggcagtgaaaaagctggacaccgaggatcacgcctgctttatcaaagcgatgggcggtactcagcacatcggcccgggcagcgtggctgacttccagcagattattgatatgaaacgcgagctggtgagcgcgcgttaatcctgcctcaacgccgcctgcttgccccagggtaagcggcggcgctacgttgaagatccccgacgcatgaagacaacccacaccgaatttgaacgctattaccagcaggtacgctcgcggcaaaagcgcgatgccgtctgctggtcgctgctgctgctggcgctctattttgccgccggcagcgccgcggaatttaatctgctgactatctggcactcgctgccccatttctttgactatatggcagagaccatcccgcccctgagcgccggcaacctgttcgccgatgtgcagaccaaagggtcgctggcctggtggggctatcgcctgccgatccagctgccgctgatctgggaaaccctgcagctggcgctggcctcgaccctggtggcagtcgccatcgccacggttttcgcgtttcttgccgccaataacgcctggtccccggcgccggtgcgctttgccattcgcgtgctggtggcgtttttacgcaccatgcccgagctggcgtgggcggtgatctttgtgatggcgttcggcatcggcgcgatcccgggctttctggcgctgatgctgcataccgtcggcagcctgaccaaactgttctacgaggcggtggaaagcgcgcaaaacaaaccggtacgcggcctggcggcctgcggcgcgtccccgctgcagaaaattcgcttcgccctgtggccgcaggtgaaaccgctgtttctctcctatggctttatgcggcttgaaatcaacttccgctcgtcgaccattctcgggctggtgggcgcgggcggcatcggccaggagctgatgaccaacatcaagcttgaccgctacgatcaggtgagcatcaccctgctgctgatcattctggtggtgtcggcgctggacatgctgtccggtcgtctgcgcctgtgggtactggagggtaagaaatgagcgtctggcacatgcaaccggatctcgccgccagccggcggcagcataagcagctctatcaggtccaggggcgctacctgctctacgtcgggctggtggcgctagcctgcgtgctctattacgtctggttttttctgcagttcggcatcagtggcgagcagctgaccatcggcctgcagcagattggccgctacctggcgcggatgttcgtctggcacgacttctggaactggccgttcggctattactttacgcaaatcggcgtcaccctggccatcgtcttcgccgggacgctgaccgccacggtgctggcgctgctgctctccttcttcgccgcccgcaacatcatgcgcggcgtggtgctggggaccctcgccctgctgatgcgccgcctgtttgatgtgctgcgcgggatcgacatggctatctgggggctgattttcgtgcgtgcggtcggcctcgggccgctggcaggggtgctggcgatcatcatgcaggacaccggcctgctgggaaggctgtacgcggaaggacacgaagccgtggaccgatctcccgggcgcgggctgaccgccgtgggcgcgaatggcctgcaaaagcatcgctttggcatttttacccagtcgttcccgaccttcctcgcgctgagcctgtatcagattgaatccaacacccgctccgcggcggtgctgggcttcgtcggcgccggcggtatcgggcttatctatgccgagaatatgcgtctgtggaactgggatgtggtgatgtttatcaccctgctgctggtggcggtggtgatgatcatggacaccctttccgcctggctgcgccgtcgttatatcggcggcgccgcggtgccgctgtatcagggcggacgctagcgcgcctttgcgccggatggcggcttcgccttatccggcctccccgtccggctccgactgtctccaggcccggcaagcaacggcgccgccaggcgatggcatcaggcacggagctgcttttatgccgggtggcggctgcgccttacccggcctactcgtccggctccgactgtctgtaggcccggcaagcaactgcgccgccaggcgatggcatcaggcacggagctgcgtttatgccgggtggcggctgcgccttacccggcctacaaccccaaatcaccgctggcgcaggggctgctgaaactgccggtgctggcggcctcaacatcgctgagacgttcccggaaggccggggcagcccgcatggatgcgggctgagggccgtgttttgcagggacgctgcctcggcccgacccgaagcctgcagggataagtcgaaggcaccgcgcagcggcgatgttgctggccggagcccgggggtacagggggcggcggcgactggccgccccctgtgcgcctgtctctcatgcacatctgacgctgccgccgagcgagacagtgtagaacaccgggggagccggacccggagaaagacagcaaaagaagcgcaaataaagaaatatgggtcatataggacgaggcccgaagtgagaacggggatgacgcgacgggaacgggaacagacgaa

SEQ ID NO: 192 - DNA, 20912 bp, Unknown
  source: /note="Description of Unknown: MKP2_2161_1 Mutant Bacteria sequence"
aggccgggccgatcgacgtcgaggtgtacgccaactacggctttgactcaaaggcggtggacagcgacgcgcgtctcgaagcctggcagggcgggctggtgctgagccacaccaacgacagcggggtaaacaaggtgatcctgcgctactccgacaactcggataacagcgtctacaacaaaaccgacgccctgaccacggtctacgccagcttcgagggcagccataagttcacccagcaggcgcagatcgagtatctgctggccttccatgactacgacaacggcaaggacaacaccgacaaccgtaaaaactacggtgccatcgtgcggccgatgtatttctggaacgacgtgcactccacctggctggaagcgggctaccagcgcgtggactacgaccagggcggggataaccacggctggaagctgacgctgtcgcagaacatcgccatcggcatggggccggagttccgtccgatgctgcgcttctacgtgaccggcggccaggtggataacgagcacaccgcgaaggtaaacggcacccaggaccagcagctggattcgctgaacgtcggcgggatgtttgaggcgtggttctgatgcgatagcgttgtcgaaggagcgttcccggctggcgctacgcttagccgggctacgactggcgcgctccatttatgccggatggcggcatacatgccttatccggcctacagaaaacctcccccccccaggaccggcaagcgcagcgccgccgggcagctggttcaggccaactccctcagttcaccgtcaggcgcagggccagatcctgcgggtaggggtcaaaatagttctgcgcctgcaggtagcgatccggatactcggccagatagtgcttaagcagcgtcagcggggcgaggatcggcagcagcccggcgcgatagttgaggatcacctcccgcagctcgccgcgctggcggctgttcagctggtcgcggaaataaccctgaatatgcatcagcacgttggtgtggtttttccgcgaggcgggctgcttgaggatcgccatcagcttctcgcggtaaacctcgaagaacgcctccagatcctcccattcatgcagcgaggcgacgaacgggccgatctcccggtagcccgcctggtgatgagccagcagctgcagcttgtagcggctgtgaaaggccagcaggctgtggcgggtcaggccgcgggcgcgcagggcgttgagttcatgcagggcgaaaacgcgctcgacaaaattctcccgcagcagcggatcgtgcagccggccatcctcttccaccggcagccacgggtagcgcgccatcagggcgccggtaaacagccccacgccttccttacgcccgcgattgcctttttcgtcatacagccgcacgcgctccatcccgcagctcggcgatttggcgcagacgataaagcccgacagctcacccagggttgcgaggtgggcgctggcgaaatcagccatcttctccgtcacatcctcgtgcggggcgtggctgaagcgcatgcggatctccccgaccggggtctgcaccaggcggagcgccgggcggggaacgggcaggccgatcgccatctccgggcagacgggtttaaacgccacccactgcgcgagctcatccatcacaaagcccatacgcttatgcccgccgtcgaatcgcacggctgagccgggtaaacatccgctgatcccaatgacaggttgcgtgttcatggcgctgtcctctcttctgctgtggttcgggtaaagaaaagggtcacggtggcgaccgtagtgccgaatttcttcatctcggttttgttaaataaatggctgccgtcctgcaggaacatccagtcgtcaaagtgcagcagccaccggctgccgctggcctcgacgctcatgctgtagcgccagtgaaaggcattgcctgccgcctggccgctggccacgccttcgatatccccggcggtgccctgataacggttatcgccggtgcggcgaatgcgccatatccgctgctgcttctcgccgtcgtcatagacaaagcgctcatggagggtcagggtgtcgccgacgacgtcgccatcgatctcaacatggaagcggcgcagctgcttgccgctacgatcctgcaccatcccccacgcctcggttcggccctgaaaatagtgaaagatgtcgagggcgggctgctgctgccggtattcggtgacctcggtgctgcagccggcgaggatctgcatcagcagcgccaggccaagggtcagaatgcgtttcatggtgtacctccgatcaactgctgacgcagttcgggataagtggtgcgcggatcgagccagatggcgagaaagcgggtgctgaacgccgccgactggcgcgggccgagcggggtaaaggcggtctgcgcggcgctggcgcggtaccagaactgcccctcgccgccgctgaccacgaacgccagctggctgcccggcgcgacgtccggccagatcccctgcagcatgcgtagccaggcttcgctgcgcggttcctgctgcagaatgccctgcgcctgccactggtcgcgggtggcctccaccagcgcctcgcgatcgatgtcgcgccggtaggtgatgatcagcgcccgatcctgctgcgggccgtcataccggccattgggcgtgcgcagctgcgagtgatagatggtgaacggcccccaggtgagggtcgcctcgccgacgcggcgccacgtcagccagtcggcggcgtgggccgccggggcgaggatggtcagccacagcagtaacagggcgaatctcatttttgcctccccatccccagatggaataacagcatgagcaccagccagccgcaggccatggcggccacgccaagcgccatcggcaccagcagggtcatggctccgaggcgagcgccgatcaggtaggccaccgggccgccgacggtggcggccgtggccagcacccagccgggaagcgtcgcggtgcgggtcagtcgggtccagacgacggcgaacatcagccacagggccaccatccacaggggcagcaggctgtcgccgcgaaaatcgatcagtcccgccagcgcccagcaggcgtccagaccgcagcccgccgcggccaacagcagggcgggcggacgactggccgccggcaaccgcagccaggcgaaaatggccagcgtcagccagatcagcagaccgcgctcgcgcaacatcaccaccagcgtccagtaaacatcgaacgcgagggccatcagcagatgctgcgccgggcgtgtcatacccgctccgcggtgagctgcaccacgctgatggtgcgggcgttaaatccggcttcacagtagccgaagtagtagagccacatccggcggaagcgctcatcaaagccgagcttttcaatatcctgccaggcgtgggtaaagcgctgtcgccagtgcgccagggtgcgggcatagtccgggcccatgtcgaacaggttgcgtatcacaaaatcggtatggcgggtcatcagctcgctcattgccgtgatgctgggcaaaaagccgccggggaagatgtagcgctggataaaatcgacgcttttgctgtagtcgcgatagcgctgatcctggatggtgatcgcctgcagggccattctgccgcccgggcgcaggcgcgcctggcaggtgcggaagaaggccggcaggtagcgctggcccaccgcctcaatcatctccaccgacaccagtttgtcgtactcgccgcgcagatcgcggtagtcgcagagcagcacctcgacgcgatcctgcagcccggcgcgggccatgcgctcggtagcccagcggtgctgctcccgggaaagggtggtggtggtgacccggcagccgtaatggcgggcggcgtactcggccagcgccccccagccggtgccaatctccagcagatgatcgccgggagtgagcgccagctggtcgcacaggcgcgccatcttggcccgctgggcctgggtcagatcctgctggtcgtcggtaaacagcgcgctggagtagagcaggtcgtcatccagaaaatgggcataaaattcgttgccgaggtcgtaatgggcggcgatgttctcccgcgcctgggcgcgggtgttgcggcgggtccagtggcgcaggcgggcgacgggcttgcccagcagacggaagccgcgctccagacgccccagcacctcgccgttgcgcgcaaggatctgcagcagcgccgtcagctggtggctctcccagtcgccgtccatccaggcctcggccgccgccaggctgccgccggtcagcagacgccagtacacctccggcgtgcagacccgcacctcggcgcgcagcgcggcggcggggtcgccaaaatgaaaagtctgcgccccttcgcgcatggtgagcgagccttcgcggaggccgctcaacagacgaaaaagcagccagcgcgcgagccgcacgttgcgcggcacatcgggttcaagcgcaaagacgggagcggtcatgagcgttcactcctgctgacaggatggttgtacagcggcacgcgcttcagccacagccgcagcgcctgccagtagatggcgaggacggttttcagggtcatcagcggcagacgcagcagcagcccgcgcaggttggcgcgggtcaacggcacgcggctcagggccagggtggcgtcgaacaccttgctggcctgatggttttcaatatgcatgtgcagcgttttgccgggcgcgttgaagcgccagtgatagaccatgtccatcgggttaaagggcgaaacgtgaaaggctttctccagcgggcgcgcctgctggccgtccaccgcgtagtaatgacgctcattccacggcgtgttgcgcacttcggccagcacccagcgcagggtgtcggcttcgtcatagcagtagtaaaagttgaccggattaaaatggaagccgaagtagcgcagctgggtcaggagcatcacgcggcccgccgggcggcagccggtcaggctctccagccggttcagcgcctgggccttcagcggcgcgcccagcggataatcggcatcgtaccaggcggcggcggccaggcggttgcggcggatgcccgcctcaggcagcctgtccagttcgtcgaggtcgagccaggccataaacaggcggtagacgaagtggtgcgccttcggctgcaggcgacggtggcgcaggacgccctgatagaggcagctgttcatttcagttgccctccgccgcggcgatgccctgcaccacgtcgagcgcgctgcgcaccccatcctcatgaaagccgttgtaccagtaggcgccgcagtaccagctccgctgctggccgttaatctcttcgcgccgcaactgggccgaccagctttgcgggttaaacagcggatgctcatagacgaagcgctgccagacgtagcgatcgtccaccggcgcgtccgggttcagggtaacgcagaacaggggggcgcccgcgggcagcccctggagaatattcatgttgtaggtgacgcaggcccgggcccgatccccgtcgctcaggcgatagttccagctggcccaggcgcgctggcgctccggcagccagcgcggatcgctgtgcagcaccacctcgttacgctgccagccgatgtccccaaggacttctcgttctgaatcggtgggcgccgccagcatcgccagggcctgcgcggagtggcaggcgaagatcacctggtcaaaatgcgcctccccggacgccagccgcagggtgacccccgccgggtggcggtccacctgctgcaccggcgcgttgagccgcaggtccagacgatcgccgagcctggcgagcagggcgcgaacgtattcccgggaaccgccgggcaccacgtaccattgcgggcgatcgcgaatatccagcagaccgtggttttcaaagaagcgcaaaaacagcggcagcgggaagcggcgcatctcctgcagcgacgacgaccagatggccgcccccatcggcagaatatagtggcgggcgaagaaggggctgaagcggtggcgggcgaggaagctctccagcgtcgcgcctggatccagcgcctcggtcagcgccagtttcgccagccggttgaagcggacgatctcgctcagcagtccccagaaggccggcttcagcagattgcgccgctgggcgaagagcgaggtcaggctgtggccgttgtactccaggccgctggccgggttgtggaccgagaagctcatctgcgttttttgcccgccgatccccagctcgctgagcaggcccataaagcgcggataggtgcgatcgttgtagacgataaatccggtatcgatggcccaggtgccctgcggcgtggcgacatccacggtggcggtgtggccgcccggcgtggcgcccgcttcgaacagcgttacctgatggtgtccggccagtcgccaggcgcaggtcagcccggcgatgccgctgccgatgatggctatgttcatgagcgcaccatcctgcgcaacagcaggcgctggatacccgatggcaggctggccagcagccgcagggccaggctgaagccggtggggaaggcgatgtggtttttgcccttcgccagaccgtggcggatcgccgccaccgcccgatctacgctcacccgaccgggcatggcgaagtcgtttttgcgcgtcagcggggtgtcgacgaagcccggaaagaccaccgtgacggcgacccctttcgactcccagtccagacgcaggctgttagcaaaccagctcagcgccgccttggaggcgccataggcttccgcgcgcgggaagggcagccagtgcgccatggagctgaccagcaccacccgatcgcctgcctccagctgcgtctgcagcgccgccaggcagttcaccggcccgaggaagttggtggccatcacccgctccacgagggcggcatccacctgtccgtggtcgaggtattcgcaggtcccggcgcagagaatgatcaggtcggcaaaacagcctgtcagcgcctggcgacaggcgtccctgtctgtcatatcgaacaggcgtccgctgatgttggggctgaactgctggagcgctgccaggcgcgacgcatcgcgcccgcaggcgatgaccagatggccatccgccgcgaaggatttcgccaggccggcgccgatcccggagctggcgccggtgatgagcaccgtcatcatgagcgcaccctccgcttcacgccgcgtaccgcccagcccagcaggggaagatgctcgtagatcatctccccggcgtcgtagtagtcgcgctgatggggaacctgctccccggcgatgtccaccaccgagcagcccggcagggccagggtttctccaccggcaatgcgcggatgcgaccagtgcatggtccaggtcacggcgaaccgctggccgtcgcaaagcggcgtgtcgatggtgaaccggcactgctccacgttggccagcagatgggtaaagtagcgctgaatggcgaacagcccctgatgctgaccaaaaggatcgctcagcgtcgcgtccggatggtacagcgcggccagcgccgcgggcggctgtgcatccagcccggcgtagtactcaacgaaacgacgaatcacggacggcgaggtgctcatggatcacatcctggctagatacggtagcgtaatggcatacttaaaacttacacaaataaaattatttgtccaagtttgtagaaaaatatattttatttgtgttaaaaatcatgttgttatgattggtgttttaaggagtgaaaatcacgggtggtgcaaagggcaagcgtgagcccgccgcgccaccgggcgctggcggaacagagcgtggaggtaagtgaaaacagggggttagagcgggatcacctcgagggagacgacctgctgctgccagagttcgacctgcctctggcgggcggcggaaagtttgccgctggtgaccagcagccagttgcgctgggggaaaatctccggcgccagggcggcgggtggcaccggcaggacgtcgatgcgatggccctggccggtacgtttgagcgcctcaagccagatttcgcaggcgtcggtcaggtgccagccggtgatcagaaagttgtccccgggcgccttcttgtcgccttcgaggcaaaacgaggtataggcgatgatgatgccgtcgagaatttcgcgcagcgtcatgatggccggcacgttggcggagacctggctgcgcagcggacgcagcacctcggttaccagctcctggcgcggatattcgcgcccggcgtcgtagatcagctggcgcagagactcgatttttccctctttcagtcgctgcagcatggtctcctgcagcgtcagccagttattggtgcgccgcgcgccggggcgcgacagcaggggtttcacctggctgaccggcaccccttttttcacccagtcgaggatcttcagcgcctgctggacgtcgtcatcgctgtacagacggtgtccaccatcggtgcgcagcggcttaagcaggccgtagcggcgctgccaggcgcgaagcgtggtcgcatttatcccgcatagtcgggcaaattcgccgatggagtaaggcatggggaccacctgttaacaaagaatattctcaatatactacgaatcacgacggctggcgtgaagtgtagtggctttgcactacactttccccaaccgcgtaaatgaaaggagttctcatgaagctatggcctgttgtcaccggcgtcgctatcgcgttaaccctggtggcctgcaaatcgcccacgccgccgaagggcgttcagccgagtagcgggtttgacgccagccggtaccttggaaaatggtatgaggtcgcccgcctggagaatcgcttcgagcgaggcctggagcaggtgaccgccacctacggcgcccgcagcgacggagggatcagcgtcgtcaaccgcggttatgacccggtcaaaaaacgctggaatgagagcgacggaaaagcctacttcaccggcgcccccaccaccgcggcgctgaaggtgtcgttcttcgggccattctacggcggctataacgtgatccgcctggacgacgactaccagtacgcgctggtcagcggccccaaccgtgactatctgtggatcctgtcgcgcacccccaccattccggcggcggtgaagcaggattacctgaataccgcgcgcgagctgggctttgacgtcgatcgcctggtgtggatccgccagacgccgcgctagcctcgccgcttagcggctgagcagatgggtataaaccacgtacagcccggccagcgccgccacgttgagcgctacgctgatgaaaaaccgcgtccggaagggctgcttttgcgttttatggcgaaagcactgctggccgaggatggcccccggccagcctcccgccaggcccagcaccagcagcgtggtttccggcacccggcgccaggctttgcgcgccgccagcttgtcggcgccatagataagccatgtcagaaggctgctcagtaaaaaccacatcgccagcgggtagggcagcagggcgctgcccacggcggtgagcagcagcagggaataacataccaggttcagattcatagggacgttcacgccggccagaagaatggcgccactatagccaatttcccggaccggcgtaaacgcggcgggctattggctacgcttgccccgatgccgggacagccacatcagcttatacgccgccggaatgataaacagcgacagcagcggggcggtgatcatcccgccaatcatcggcgcggcgatacggctcatgacttccgaaccggcgccggtgccccataaaatcggcagcaggccggcgataatcaccgccacggtcatcgccttcggccgcacgcgcagcaccgccccctggtacagcgcctcgtcgagcttatcgacgctgagagtctgcggattctccagcgatggctccgcctcgatggcgtggcgcaggtacatcagcatcaccacgccaaattctgccgccaccccggcgagggcgataaagccggtcccggtggccaccgacagatggaaccccatccagtagaggaaccagatcccgcccacaagggcgaacggcacgctggtgataatcagcagtgcttcgccgacgcggcggaacgccagatacagcagcacgaagataatcattagcgtcatcggcaccatcagcttcagcttctgattggcgcgctccagcagctcaaactgcccggagtaggacacactgatgcccggcttcagcttcacctccttgccgatggcctgctgcagatcgtgcactaccgacaccatgtcgcggtcgcgggcgtcgatgtagatccaactggtcgggcgggcgttctcggtcttcagcatggatggtccagtgaccactttcacctcagccacgtcgccgaggacgatctgttgcttcagcggcgtgaggatcggcagctggcgcagggtctccgggctgtcgcgatagctctgcgggtagcggatgttgatcggatagcgctcgacgccctctaccgtttcgccaaccatcgccccgccgatggcggacgatacaaacagctgcacatcgccgacggtcatcccgtagcgggccgccttctcacgatgaatatcaatgttgaggtagcgcccgccgcccaaccgctcggctaatgccgacgtgactcccggcacgctgcgcgccaccccttcaatttgcccggcgatggcgtcgatatcggccaggttggtgccggaaaccttaatgccgatcgggctcttgatgccggtggagagcatgtcgatgcggttgcggatcggcggcacccacaggttcgccagccctggcagacgcacggttttatccagctcgtcgacgatcttctccatggtcatccccggccgccactgatcctgcggcttgagctgaatggtggtctctaccatctccagcggcgccgagtcggtggcggtctcggccttgccggttttgccgaacacccgcgccacttccggcaccgccatgatcagcttatcggttttctgcagcatatccgccgcctgcgcagcggagatccccggcagcgtggacggcatatacagcagatcgccctcgttgatctgcggcagaaactcgccgccgacccggttaagcggccagacaaccgtcaggatcgacaggagcgcaatcagcagggtagtcttcggccagtgcagcaccttcagcagcagcgggtgataaatgcggatcaaaaagcgattcagcggattgctgttctccgctgggatcctgccgcggatccagaagcccatcaggatcgggatcaccacgatcgccagcagcgccgccccggccatcgaccaggttttggtgaaggccagcgggccgaacagtttgccctcctggccttcgagggtgaaaatcgggataaacgacagagtaatgatcagcaggctgataaacagcgccgggccgacctccaccgaggcctcggtaatgattttccagcgtgtgtcgttgctgagcttctctcccgggtgctgatgctcccactcctccagccgcttatgggcgttctcaatcatcacgatggcggcatcgaccatcgcccccaccgcaatggcgatcccacccagcgacatgatgttggcgttgagcccctggaaatgcatcatgataaaggcgaagcacaggccgagcggcagcgagataattgccaccagcgccgagcgcacgtgccacaggaacagggcgcagaccagcgccacgacgataaactcttccagcagcttgtagctgaggttgtcgatggcgcggtcgataagctggctgcggtcgtaggtggtgaccacttccaccccttccggcaggctgctttgcagcgacgccagcttctctttgaccgccgagatcacctcgcgggcgttcttgccggagcgcaggatcaccacgccgccggccacttcgccctcgccgttaagctcggcgataccgcggcgcatctccgggccgatctgtacccgcgcgacgtcgccgagataaaccggcacgccgttatccccggttttcagcacgatatttttgaagtcgtcgagcgtctgcaggtagccgctggcgcgcaccatatattcggcttccgccagttcgacggaagagccgcccgcctcctggttagagccgcccgcctcctggttagaggcgtccagcgccgatttcacctcgccgaggctgatgccgtactgggtcagcttcatcgggtcgacgacaatctggtactccttgaccacgccgcccaccgacgccacttccgagacgttaggaatggttttcagctcatattttaagaaccagtcctgcagggagcgcagttcggcgagatcgtgcttgccgctgcggtcgaccagcgcgtactcgaagacccagccgacgccggtggcatccgggcccatttcggcgctgaccccggcgggaagtttgccctgcacctggttgagatactccagcacccgcgagcgcgcccagtaaggatcggtgccgtcttcaaaaatcacgtatacgtaggagtcgccaaactgcgagaagccgcgaaccgttttggcgccggggactgacagcatggtggtggtcagcggccaggtgacctggttttcgacgatctgcggcgcctgccccggatagcgggttttgacgatcacctgcacgtcagagagatccggcagggcgtctaccggggtgtggatgatggtccaggttccccagatgctgagaaacagcgccgccatcatcaccaggaagcggttggccaccgagcggcggataatccattcaatcatggttccgttccttagtgcgcgtgggcggcagaggccgcggcatcaggggcctgcgcgcgcatgcgctccagcgcgccggcgatattggcctccgagtcgatcaggaacaggccgctggcgacgactttctcaccctcctgcagcccgctgcgaatggccgtgacgccggcggattcatggaatacctgcacgattttcggcacgaagcggccctcgttatcgacggtgatcactcgctgctcgctgccgctgtcgatcagcgctttggaggggatcagcagcatcggggcgctttcgctggtcagctgcagataggcgttcatccccggcttcagcgcttcatccgggttgttgacctgcaggcgcagctgcagggtgcgggtggcgctatcgacgctggggagaagggtccatttgctgatgcggaaggttttgcccggccaggcgggaacctgaatgctgaactgcgaggcgtctttaatcagccaggcgatggattccgggaccgccacgctgacccacaccggatccatgccctgaattttcgccaccacgttatctttggcgatgttcattccggcgcgcagatcgaaggcggtaataacgccatcgatcggtgctttgagagtaaagcgggtctggattttacgcgtggctttcaggcggcggatatcgtcatccggcattccggcgagacgtagacgctcgaggatcccctcgacctgcgtagcggtgcccccggtctcctgcaatagcagatattcgctctgcgcttccacccagtccgggatggtcagctcgagcagcggcgtgccttgtttcactttgtcgccgacggtcagcggatagactttattgataaagcccgccgcccgcgcctgcataatcacatactggtactcgttatagctgatattggccgggaaggtctgagcgtagcgcagcggcccgcgggtgacggcggcggttttcaccccaagattctgggtctgcgtcgggtcgatacgcacccccggtgcaccggcggcggcatgctcctcatcggcgtatttcggcaccagatccatatccataaacggcgatttacccggtttatcgaagcgggtgttcgggtacatcggatcgtaccagaacagcactttacgctgctgctcggccgccggagcggcagagtgggtcggagcccatcgggcgtacagcgccgcggtaagcgcgccgccaatcagcatgctgccgaggatcagcgccgtatttttcagtgtcagggatgccatgtgtcgtccattcagttgttgaggggcctaccgtcgccgggccgttattgggcgcggatatcctgtaacagcgacaggttgccctgctgaacgaaggtgaagtccacgctgtcgccatccttcacattgttgagctgcgtctgcggggtgatggtgaagcgcatggtcatcggcggccagttcaccgccgggatggcctcgtgggcgatagtgatttttttgttatccatatcaatggctttaatgacgcctttgccgcggatgctttgcgtctgcgcggcggcgggctgctcgtgcatcgccatgctggcgtgcgggtcggcagcctgggcggcgaacaccgcgccagagagcagggtgaacagggcgattttagatagtgaattcatgttcgggactccttgggttattccatccagccgccgccgagagcggtgaacagggtgatttcatttgcctgacgggaatagttgagttccagcagggtttgtcgggtggtgaaaatatcgcgctgggcgctcaggacttcgatatagctgaccgcgccgtggcgatagagcgcagtggcgcgctgcagggtgatattcagcgaggcgagatagcgctcctgcgcggcaatttgatcggccaggctctggcgcagggccagcgcgtcggccacctctttaaaggcggactggattttttgttcatagttgaccacctgctgctgctggcggatctccgccagatcgaggctggcctggttgcgcccggcgttgaaaatcggcagttcgattttgggaatgaagttccacatcgcgccgccggcgttaaacaggctggagagttcgctgctgctgccggagagcgagctggtcagggtgatcgacgggaagaaggccgcccgcgcggcgccgatgttggcgttggccgcttgcaggctgtgttcggcttccagaatatctggccgctgcaggaggatcgctgaggagagcgatggcggcagggttacgccttgcaggtctaccgcgctgctggcgctatcgtccggcagatgttgatagctgccgagcagtagctgcagggcgttattggcctgcgccagctggccctgacgtttggcgatatcggcgcgggtgctttcgatcatgtcgcgcgcctgctccagcgccagcacggtggtgctcccggtcagcagctgtttttcaacgaaggcgtaagactgctgatagttctgtaaggtatcgttggccacctgcagctgcgctgccgccagccgctggttgaagtagctttgtgaaacgttagcaatcaacaggatatgcactgcgcgccgtgcctcttcgctggcgaagaagttctgtcggtcggcctcgctaaggtttttcagccggccaaagaaatcgaggtcatagctgaggtttaagccggcggcataatcgctgctggtggtggtgtcgcctttgagcttgccgccataggtggtgctgccgtcaccggtaagctgtgggtagcggtcggcgtcggttacccggtactgggcgcgggcttcctgcactttcagcgtcgccatccgcagatcgcggttgttggtcagcgcggtgctaatcaggcttttcacctgcgggtcgacgaaaaaggtgcgccaaccggtctcctggtagcccgctgtcgcagtaaccagcttgttctggctgagagagaactgctgcggcaccggcgctgcggggcgctgatagtccggagcaagtgacagacagccggttaaggtaaatatcacgctgagggtaagtagctgtattgagcgcatggcggcagaagtttcgacgatttatccatggcggctactttacgtagcgggctctgttcagggcgtgacgggaaaatgacaaagctgtcattttcctgatatttcattgctatccggaggcgctcctctaaaattgaatacccgcacaaagcgcgcgtgaaggagcctgccgtgaagattttgattgtcgaagatgagaagaaaaccggagagtacctgaccaaagggctcaccgaggccggcttcgtcgtcgacctggccgataacggcctcaacggctatcacctggcgttgaccagcgattacgatctgctgatcctcgacatcatgctgccggatgtgaacggttgggatatcgtgcgcatgctgcgcgccgccgggaaaggcatgccgatcctgctgcttaccgcgttgggcaccattgagcatcgggtgaaggggctggagctgggcgctgacgactatctggtaaaaccgttcgcctttgcggagctgctggcgcgggtgcgtactctgctgcgccgcggggcggcggtcatcgtcgaaagccagtttcaggcggccgatctcagcgtcgatttggtcagccgcaaggtgacgcgcggcgccacccgcatcaccctgaccagtaaggaattcacgctgctggagttcttcctgcgtcatcagggcgaggtgctgccgcgttcgttaattgcctcgcaggtgtgggatatgaacttcgacagcgacactaacgccatcgacgtggcggtgaagcggctgcgcgccaaaattgataacgacttcgagccgaagctcatccagaccgtgcgcggcgtcggctatatgcttgaggtgccggatggccgctaagcgccccttttccctggccacccggctgaccttctttattagcctcgccaccgtcattgccttcttcgccttcacctggctcatgatccattcggtgaaggcccactttgaagagcgcgacgttcacgatctcagacagctcagcaccaccctggagacggtcctcgaccacgctgactacccgcaggcgcggcgtctggagatcgtgaagaatatcattgcgggctacgccaacgtcttcatctgcctggacgatggccagggcaatattctcttccagtcgcccaacgggccggatctcagccatatgctgagtacgccggggctggcgatgcagctccgcgacgggaatgtgatttcatggaccgacccgcagccgcgggcaatggcgcacgataatcatccactggagacccgcgcctggcggctgatcatgctgccgctgggcaagcaggcggacggtaaaccggcgtaccacctgctgatggccttatccatcgattttcacctgcactatattaatgagctgaaagcgaagctgatctccgcggcgtcgataatcagcctgctgatcatcgccatcgtgctgtttgtggtctaccaggggcataagccgatccgccagatcagccgccagatccagaatattacctcgcgggatctcgatgtgcgccttgacccgcaggcggtgcctgtcgagctggagcggctggcgctgtcgtttaaccatatgctggagcgcatagaggatgtctttacccgccagtccaacttctccgccgatatcgcccatgcaatccgcccgccgattaccaacctggtgacgcaaaccgaaatcgccttaggccagagccgccgcccgcaggagctggaagaggtgttgtattccaatctcgaagagttctcgcggatgtcgcggatggttagcgatatgctgttccttgcccaggccgataacaaccagctgatccccgaacagcgggcgctggatttggccgatgaagtgcataaggtgtttgagttctttgaggcgtgggcggaagagaaagcggtggcgctgcgttttgtcggtagcccctgccgggtgacgggcgatccgctgatgctgcggcgggcaatcagcaacctgctgtcgaacgcgattcgctatacgccggccgggcaggcggtgaccatccagttgagcgaaagcgcggagacggtacgcctggtggtggagaaccccggtatgccgattgccgccgagcatctgccgcgcctgtttgaccgattctatcgcgtcgacccctcgcgccagcgcaaaggggagggcagcggcatcggcctggcgattgtgaaatcgattgtcggagcccaccacggcagcgtggcggcgcagtccgatctgcgctcgacgcggtttattgtgatgttgccgaaataggcgcaatccgcgagtgatagttgagtatgtggctttctgtcgctatattgaatgtacggaaaataaccgtacatgaagtttgcaacaggccggagataacgtatgcccgcacttaaaaagcagcgtatagatttgagattaaccgatgatgataagagcatcatcgaggaagctgcggcaatttcgaatcagacgattacccagtttgtggttgccagtgcctcagaacgtgctgcggaagtgattgagcagcaccgcagaatggtcctcaatgagcaatcatggagcctggtgatggaggcgattacccaaccgccagccccgaatgatcgactgaaacgtgcagcgaagcgtctacaaaccaggtaaggtagagctaatggagcagcaactgacgattgagatgattgccgatgcgttcagctacgatatcactggatttgattgcggcgaggaagcgctgaatacgtttttaaaagagcacctcaagcggcagcacgatggacaaatcttaaggggttatgcgctggtctccagggataccgttcccaggttgctgggttattacaccttatcggggagttgtttcgagcgaggcatgttgccgtctaaaactcagcaaaagaaaatcccgtatcaaaatgcgccaagcgtaaccctcgggcggctggccattgataaatctgttcaggggcagggctggggagagatgttggttgcccatgcgatgcgagtggtgtggggagcgtctaaagccgttggcatctacggattgtttgttgaagcccttaatgagaaggctaaagcattctatcttcgtctggggtttatacagctcgtggatgaaaatagtaacttactgttttatccgaccaaatcgattgaacagctctttactgacgatgagtcataaaagaaaccgggcagcgccaggcggctgcccgcagtatcgcgactctcttactcttcgaagtaccagtagccctgattaatcagccgcgtcagttcgctcacgaacgccggattctgcaggccgctgccgagctcttcctggcctaatgaggtatagcgacacagcgcatccagcgcttcggcatcggtggtgtcgagttgttcgctatgcacgaagaagctgtcgccgatatgcagaacgcgcaggccgctcaggcgggaaagcttttcaccacccagcagcgcatcgaccacttcctcttcttcatacggtggttccgccggcgcaatatccagctcgtgacgcggggtggtgacgaaactgccgaaccactgcttgaagtcttccggctggcgaatcatatcgatcatcatggtgcgcagacgttcgagttcatactcttcaacccggcccggatgctcgcggcaggtgaggtccggatcgctgtagtgctcgtcgccgagatcgttctccagcacatagtcggcgaagctgctgatcaggtcgcggccgtttggcccgcggaagccgacggagtagttcagggcggtttcgtgggttatgccgtcgtgcgggaatcccggtggaatatagaggatgtcgcccggctgcagatcttcatcaatgatcggtgggaacggatcgacgtgcagcagtgccggatgcggacagaactgacgcatcggcagcttgtcacccacgcgccagcggcggctgcccatgccctgaataataaagacgtcatactgatcgatatgcgggccgacaccgccgccggggacggagaaggagatcatcaggtcgtccaggcgccagtccggcagtacgcggaacgggcgcaccagctcggcggccggcatatgccagtggtttaccgcctgggccagcagggaccaaccggtttcgcccagcccgtcgaaatgttcaaaaggaccattgctggcctgccatttgccgtttttcaggctgaccagccggctgtcgacttccggctccatggctaatccggccagctcgtccggagtaatcgggtcgacgaagtccggaaacgcgttttttaataccaccggctgtttctgccagtatttttctaaaaactcgggccagttaatgttgagttgataagccatcgattattaccagtaagaagaaacgggcctgattatagaaatgagggccgggcgggcgcattgtcgtgggtcaagagtggtgcttaattcaccatcggcgcgataatggcgttgggtaagagagaaaaatcacatttttgccaaaaaccgatcttagcgtaaattgcgctgcaggccgcatgagcactgggattgagcctttaatggtaagaagatgaattcgcgaaaagttcaaataatgagcggtcgataagatttttctattttaacgcttgctacttccgacgaactccctataatgcgctcccactgacacggcggatgtgaatcacttcacacaaacagccggttcggttgaagagaaaaatcctgaaaaacgggttgactctgaaagaggaaagcgtaatatacgccacctcgcgacagagcgctaaagcgcgtcgcaactgctctttaacaatttatcagacaatctgtgtgggcactcaaagtgacatggattcttaacgtcctcggacgaaaaatgaataccaagtctcaagagtgaacacgtaattcattacgaagtttaattctttgagcatcaaacttaaattgaagagtttgatcatggctcagattgaacgctggcggcaggccta

SEQ ID NO: 193 - DNA, 20735 bp, Unknown
  source: /note="Description of Unknown: MKP2_2161_1 Mutant Bacteria sequence"
tggtccggggcccgtggctcttcccgttctcggcttcgccaccgtttactgcgttaagtccaccttgctggttgcccgggcgctgggctccgcggtccactccatccccgacggctgtcccggcgtaaatctgcagccgcggtacagacgccaggcgtttatggagatggcccccgcgggcgccacgccctataccctcgacgactggcgggaaactcagccctgttccccccccccccccccggcgcccccgcgccgggtcttcttctgccgcctcgctattgtccataaattgaactctctcgcagtttcaacaggttattgctgctagtctggcaaggctgttttttcgccacgccatttccgtggcgtggttatttttatgtcaaagaggaaccactatgaaacttttgcccttgctggcagccttgcccttgctttgcgcttccgcgctctctgcccaaccgctgatgtccgtcggctattttaacggcggcggcgacgtcaccgccgggccgggcggtgatatcgataagctggacgtccggcagatcactcatctcaactactcgtttggccttatctataacgatgaaaaagacgagaccaatgcggccctgaaggatcctgctcatctgcacgagatctggctgtcgccgaaggtgcaggcggatctgcaaaagctccccgccctgcgtaaacagaatccggacctcaaagtcctgctgtcggtcggcggctggggcgcgcgtggtttctccggcgcggcggcgaccgcagaaagtcgcgccgtctttattcgttccgcgcagaaaatcatccagcaatatggtctggacggcattgacctcgactgggagtttccggtcaacggcgcctggggactggtggccagccagccggctgaccgcgacaacttcactgccctgctgaaatcgctgcgtgaggcagtcggtgagcaaaagctggtgactatcgccgtaggcgccaatgccgagagcccgaaaagctgggtggacgtcaaagcggtggccccggtgctgaactacatcaacctgatgacctacgacatggcctacggcacgcagtacttcaactcgaatctgtatgactccagccactggccgacggtcgccgcagcggataaatacagcgccgattttgtggtcaacaattacctggccgccgggcttaaacccagccagatgaacctcgggattggtttttatggccgggtaccgaaacgggcggtcgagccggggattgactggacgaaagcggatgcgcaaaacaatccggtcacccagccctattttgggccacaacagatcgcgctgtttgcctcgctgggctatgacctgagcaaagacacctacgtgaaatacaatgatatcgtgggcaaactgctcaacgatccgcaaaagcgttttaccgagcactgggacgatgaggcgaaggttccgtggctgtcggtgcagtccgcggagggcaagccgctgttcgccctctcctatgagaacccgcgctcggtagccattaaggcggactatatcaaggcgaagggcctcgccggggccatgttctgggaatatggcgccgatgaccagaatcagctggcccgtcagctggcggaatcgctggggatcaaacactaatcatggctgttccgccgcatcgtcggcaccaggaggcgtgacgcaggcagcatcgcctgcaatgcaggtatatcgcgccgcccgggataggttatgatgcctgttatccgctgcgccagggggtggcgcagcttaaccgtttgacaggaggcagggggccatggcctatatccccaaaaagtacgcacgtctggaagtgggttaccgcgaaaaggcgctcaagctttttccctgggtgtgcggacgctgctcacgggagtttgtctactccaatctgcgcgagctgacggtgcaccacatcgatcacgaccactccaataacccggaagatggcagcaactgggagatgttgtgcctgtactgtcacgatcacgaacattccaagtacaccgaagccgatcagtatggctccacggtggtggcaggagaagatgcgcaaaagagcgtcggcgaggccacctacaacccgtttgccgatctgaaagcgatgatgaacaaaaagtaagcgaagcggctgaccgccggacgcggtcattcgacatgacgccatccggcgcgcggttacccgacgccggaacgtctcaccgccggccggcggtttattgcagtttaacggtggcgatcggcttcggcacgatgccaaaatcctctttcagctgctgtttgctcttcattaccatctgcccgctggtgtcgatggtcatgtgctgggcgtcggtgttataccgtgcctgccagagcatcaccagctgcaggctattttccttctgctccggcgtcagcgcgacgccatccggccattttcccagctctaccgccgtcgccagacgctgatacacttccggcgtcatactgtcgataatttgctcaatatccatcttccgctcacctccgcctggaataatttgctgaatcgtttcttcaacccttgatttgctcgccattttgctcatcggtgaagctcagcgatgccgagttgacacaatagcgctcgccggtcggctgcggaccatccggaaacacgtggccgagatgggcatcacagtttccgcaacggatctcaatgcgctgcatgccgtgcgaattgtcggtcagatagcgaatggcctccgcgcttaccggctcgtagaagctcggccagccgcagccggagtcgtatttagtctgggagttaaacagcggcgcatcgcacaccaggcagtggtacacgccatttttcttgttgtgcaacagccgtccggtgaaaggcggttcggtgccatgatgctgcgtcacgtaaaactgcatttcgctcaagccatttttcagctcttccggggtgggtttattcgccatgggcttacatctcgctttgcaatggactactttcgctccaattctaacaaaacattaacaatgaagcgtacacttttgttctaaacttatccggtgcccacaggcagccagataattgtgacttaaatcacgtttttatcttaaatgccctttaaaattccgcgcgcagcccccatatggaattgggctcaaagggaaagtgaggcaaatcaatcgcgcaaaggtctgctcaggattgatttgtcgcaatgattgacacgattccgcttgacgctgcgtaaggtttttgtaattttacaggcaaccttttattcactaacaaatagctggtggaatatatgactatcaaagtaggtatcaacggttttggccgtatcggtcgcattgttttccgtgctgctcagaaacgttctgacatcgagatcgttgcaatcaacgacctgttagacgcagagtacatggcttacatgctgaagtatgactccactcacggtcgtttcgacggtaccgttgaagtgaaagacggtcatctggtcgttaacggtaaaaaaatccgtgttaccgctgaacgtgacccggctaacctgaagtgggacgaagttggtgttgacgttgttgctgaagcaaccggtatcttcctgaccgacgaaaccgctcgtaaacacatcaccgctggcgcgaaaaaagtcgttctgactggcccgtccaaagacaacactccgatgttcgttcgcggcgctaacttcgacgcttacgctggccaggacatcgtttccaacgcttcctgcaccaccaactgcctggcgccgctggctaaagttatcaacgacaacttcggtatcgttgaaggcctgatgaccaccgtccacgctaccaccgctactcagaaaaccgttgatggcccgtctcacaaagactggcgcggcggccgcggcgcagctcagaacatcatcccgtcctctaccggcgctgctaaagcagtaggtaaagtactgccagaactgaacggcaaactgaccggtatggcgttccgcgttccgactccgaacgtatctgttgttgacctgaccgttcgtctggaaaaagcggcgtcctacgaagaaatcaagaaagccatcaaagccgcttctgaaggcgctatgaaaggcgttctgggttacaccgaagacgacgttgtttctaccgacttcaacggcgaagtttgcacttccgtgttcgatgctaaagcgggtatcgcactgaacgacaacttcgtgaaactggtttcctggtacgacaacgaaaccggctactccaacaaagttctggatctgattgcccacatctccaaataagttgagatgaaaaagtaatctgtaagagcgacttcggtcgctcttttttttgtctgcagagataggattgcacaatgataaataaaatttttgctctcccggtgaatgaaaccatttctcccgtgatctcccgtcgccagctggacgacctggagctgattgtcatcgaccatccgcaggtgaaagcctctgtggcgctgcagggggcgcacctgctctcctggaaacccgccggtgaagaagaagttctgtggctgagcaacaacaccccgtttaaacagggcgtcgccctgcgcggcggcgtgccgatttgctggccctggtttggtccttctgcgcagcaaggtctgccgtcgcacggctttgcccgcaatctgccatggaccctggaaggtcatgacgaagacgacagcggcgtaatgttgacctttgcgctccagcacagcgctgaaaccatgaagctctggccgcacgagttcaccctctatgcccgctttaagctgggcaagacctgtgaaatcgagctggaagcccacggtgaattcgagaccacctctgccctgcacagctatttcaacgtcggcgatatcgcggcggtgaaggtgagcggtcttggcgagcgctatatcgataaagtgaacaatgccgaagaaggcgttctgagcaacggcgtgcagaccttccctgaccgcaccgatcgcgtctatctcaacgccgacagctgcagcgtgatccatgacgacgcgctaaaccgcactatcgacgtggtgcatcatcatcagcacaatgtggtggcctggaacccgggcccggcgctgtccgtcagcatgggcgatatgccggacgatggctacaaaaccttcgtttgcgtcgaaacctgctgcgtaacccagccgcagaaagccagcgaagagacgccctctcgcctggcgcaaaccatcagcgtgaaaaaacgctaatagcaaaagccccgttggtaacggggcttttgtttttctttgccgtgaacgatgggttaaaccatatccagccgggtttttcgctgcggcggcggatagaggcggtccagctgcgcgagctcttccccactaaggacgatgtcgagcgctgcggcattctgcaccacatgctcaatactggccgctttcgggatcgccagcactcccggatgacgaatcacccaagcgagcagcagttgcgctaccgtaatcccccgcgcgttagccatattaatgatatcgctatgctgaaaaagtccatcgcgtaagcgccccgcctgcgccagcgggcagtaggccatcaccggcagactgtgctgctggcaccagggcaggagatcgtattcaatgccccgcgatgcgagatggtagagcacctggttggttgcacagtgctcgccatccgccgtccgccacagcgcctgcatatcctcggtgtccagattagagacgccccagcggcggatcttgccctcggccaccagcttctccatcgcctcaaccgtctcctgcagcgggatatccccgcgccagtgcaggagatacatgtccagatagtcggtctgcagccggcgcaggctgttttcacaggcgcggtgcatcgccgctttgccggcatgccagggatagactttggagaccagcactacccggtcgcgcagaccgcggatcgcctggcccaccacttcctccgccccgccgtcggcgtacatttccgccgtatcgatcaccgtcagtccatggtcgatgcccgcacgcagtgcagccacttcctgctgacgctgcgccgcatgttcgcccatataccaggtgcccagcccgatggccggcactgcctcctgctcgccgaagcgtactgtttttttcaccatcttctcctccttaaccgtatgcaccaccataaagcaaaacagggcgcaaggccctgttttgatgcatgaagcgcactgtaagaatgcacaatcagaaggtgtaggtgatcccggtggagatcagaccgctccaggatttatccaccatcggactgtcggtaatttcatccgacagacgcgtgtagcgcgccacgccgtaaacgctccagtcaccgaggaagcgatagttagccgacagttccagatatgggttccagctactgtccgggtcatagctgcgcatgccgctgcggcgcgactcgtgccgggagacaccatagtagtattcgttctgattgtcgctgttccactccacgccaatacccggcgtcagcgtcaggttaccgttggtgtaacggtacagccaggcgagatcccagttaataccgttgctgttatccagcgtatcgccggcaatcgtcgtgcgcaggaagccatagggcgtgttgtggacataagaaagaccggccatcacggtcgatttacgtttatccagtcgacgcatctgctcgctgtcgctgtcgcccggcttgaagtacattggcgaccagtaggccgtaatcgacagtttatcgttggtgtcattccacaggtagtaacccccgcccagaccgtggaaccagaagttttcgctctcataactaatgaccggcaccggatagacatccgcatcgtattgcttatacggatgctcaacgacccctacgccagccccaagagtgaacttcccgtcggcatgcgccgcgctggcggacgtcgctatcagcacgccgagtgccagaagtttgattttagtcacaatccatattcccgttgtcaaataatcagcccgtgcagtgtaccgtcgtaggtctcatgcctcaaattctttacccgatatgacacaaatcgttcactttgccacccttctcttaccatccggtgacagcccgatgacaactttgcgtcccaacgaatcaaaaagcgtcatgttcaggatgagttattgatatgtcattgaaattgattttctgcgccatgcaagatttctaaatgcatctacgcttaaatttagaaggtgtaattgccgggcacattcacgctaccccacccgcaacctggcataagggttgctggataccaggagagcgatgttcagcttatgtcttccgggggcccccactattcatatgaacggctctcaacctgtgctaaaaaacgaaaggacggcatgccatgaatatattcgatcactatcgccagcgctacgaagctgccaaggacgaagagttcacactgcaggagtttcttaccatctgccggcaagatcgcagtgcctatgccaatgcggcagaacgtctgttgatggccattggtgaacccgtcatggttgatacggctctcgagccgcggctatcccgtctcttttcaaaccgggttatcgcacgctatccggcatttgaagagttttacggtatggaagacgccattgagcagatcgtttcctacctcaagcatgccgcccaggggctggaagagaagaaacagatcctctatctgctggggccggtgggcggtggtaaatcgtcgctggctgaacggctgaaagcgctgatgcagcgcgtgcccatctatgtgctgagcgccaacggcgaacgcagtccggtcaacgatcacccgctgtgcctgttcaatccgcaggaagatgcgcagatcctccagaaagagtatggcatcccgacccgctatctcggcaccattatgtcgccgtgggcggccaagcgcctgcacgagtttggcggcgatatcactaaattccgcgtggttaaagtctggccatcgattctcgagcaggttgccatcgccaaaaccgaaccgggtgatgaaaacaaccaggatatttcagcgctggtcggtaaggtggatatccgtaagctggaacactatgcgcagaacgacccggacgcctacggctactccggtgcgctgtgccgcgccaaccaggggattatggagttcgtcgagatgtttaaagcgccgattaaggtgctgcatccgctgctgaccgccacccaggaaggtaactataacggcaccgaagggatctccgccctgccgtttaacgggatcatccttgctcactccaacgaatcggaatgggtgaccttccgtaataacaagaacactgaggccttcctcgaccgcgtctatatcgtcaaggtgccttattgcctgcgtatctccgaagagatccgcatctatgaaaaactgctcaacaacagtgagctgacccatgcgccctgcgccccgggcaccctggaaaccctggcgcgcttttcgattctgtcgcgcctgaaagagccggagaactcgagcatctactcgaagatgcgggtctatgacggcgaaagtctgaaagataccgacccgaaagcgaagtcctatcaggagtatcgcgattacgccggggttgatgaagggatgaacgggctctccacccgctttgcctttaagatcctgtctcgggtatttaacttcgaccacgtcgaggtggccgctaacccggtgcatctgttctatgtgctggagcagcagattgagcgcgaacagttcccacaggagcaggccgagcgctatctggaattcctcaaaggctatctgatcccgaaatacgccgagtttatcggcaaagagatccagaccgcttatctggaatcctactccgagtatggacagaacattttcgatcgctatgtcacctacgctgacttctggatccaggatcaggaataccgcgatccggacaccgggcagctgtttgaccgtgaatcgttgaatgccgagctggagaaaattgagaagccagccgggattagcaacccgaaagacttccgtaacgaaatcgtcaactttgtgctgcgcgccagagccaacaacagcggacgtaatccgaactggaccagctatgagaaactgcgcacggttattgagaagaaaatgttctccaataccgaagagctgttgccggtcatttcgtttaatgccaaaacttcaaccgatgagcagaaaaaacacgacgactttgtcgaccgcatgatggagaaaggctacacccgcaaacaggttcgcctgctgtgcgagtggtacctgcgggttcgtaaatcgtcctgatgcgtccaacccggcggcacgccgccgggtcaactgcagctgaatgatgataagtaaagttggctaatgcagtacaggagggcatatgacctggttcatagaccgacgcctgaacgggaaaaacaaaagcgccgtcaaccgccagcgctttttgcgccgttataaggcgcagattaaacagtcgatctccgaggccatcaacaagcgctcggtgaccgatattgagagcggagaatccgtctcgatcccgacggacgatatcaacgagccgatgtttcatcagggtcgcggcggcctgcgcaaccgcgtccacccgggcaacgaccattttgtgcaaaacgaccgcattgagcgcccgcagggcggtggcggcggcggcggtagcggtcaggggcaagccagcgccgatggtgaaggaaaggatgagtttgtcttccagatctcgaaagatgaatacctggatctgttatttgaagatctggccctgccgaacctgaagaaaaaccagcaccggcagctgaatgagtttaaaacccatcgcgcgggttttacctccaatggggtgccagccaacatcagcgtggtacgttcactgcagaactcgctggcccgccgtacggcgatgaccgccggcaagcgtcgtgaactgcgcgccctggaggaggatctggaagccatcagccgcagcgaaccggtgcagctgctggaggaggagcgcctgcgcaaagagattgccgaactgcgggctaaaatagagcgggtgccgtttatcgacacctttgacttacgctacaaaaattacgaaaaacggccggagccttccagccaggcggtgatgttctgtctgatggacgtctcaggctcgatggaccaggccaccaaagacatggccaagcgcttttatatcctgctgtatctgttcctcagccggacttataaaaacgtcgacgtggtctatatccgccaccatacccaggcaaaagaggtggatgagcacgaattcttctattctcaggaaaccggcggcaccattgtctccagcgccctgaagctgatggatgaagtggtgcaggcccgctatgacccggcgcagtggaacatctacgccgcccaggcgtcggatggcgacaactgggccgatgactccccgctgtgccacgaactgctggcgaagaaaattctgccggtggtgcgttattacagctatatcgaaattacccgccgggcgcatcagaccctgtggcgcgagtatgaacacctgcaggcgacctttgataatttcgccatgcagcatattcgcgaccaggaggatatctacccggtattccgcgaactgtttcacaagcagtcatctaaaagtgaagcttaattaaatactcagccagtgagtcgagtgacttgctggctgttttcctcagacacaaggcccggtggcacatccatacatcatgtaaaacggaaacaacggggccagggcaacggcgccaagcgagctaatcgttttggtcttatcattgattgataccacaacggggtgcgctaactggtaggcggcggccagatctgacgcgtccgatgcagtccaaaatcctgtcgctttaaacaacaccccgaggcgatcgttatcaatttgcaccgcatgatactgattcaccagctcgctatgctgcccggcatccagtttgcgctgatccatcaccaccagatattccgccgtcacctcatgttgttccacgacaaagttaacccgcacgccggaagcctgttggtgaaagcgttcataaaaggtcttataacgctgatattcctgaggcacaccgtcacggacaaagcagtaactgtatttcgctgagctggcgacaataccggactctgtgggtttcatcgccacaatggtatcccgaggcggcaagtttggcgtgctggtacatcctgcgagtatcgccaccaccaccagcgataagacatatttcattattttcagccgttcctgttcgcgattttctctatgacatctggcgttttttaacactccaggtacaaatccctaaccctgtgtatcataactgcctaatctgcttcaaacattcgcgcgatcgtcagcgttgaactgtttctactctcaggagcctgctatgacccctttttatcaattgacggctacccgcctgcgcggccagcccctcgccatggctgactatgctggcaaggtggttctggtggtgaatacggccagccattgtggcttcacaccgcaatacgctggcctggaagcgctctacaaaaagtacgcggctcaggggctggtagtgcttggtttcccgtgcaaccagtttggtaagcaggaacccggcggtgcggatgaaatcgagcagacttgtcacgttaactacggcgtgagcttcccgatgcttgagaaagtggacgtcaacggccccgccgcacacccgctgtttcgttatctgaaacaagcgttgcccggcgtgctcggcggacggatcaagtggaatttcaccaagttcctcatcggtcgcgacggcacacccctcacgcgttttgcgccgttcacgacgccggagaaaatggaagcctccattgtcgcggccctcacgcgctgagtgttcccatcatgccacgttcacccagcggcggctggctgcccatacaaggtagacgtcgctctcacgcggccagcaaccgcctgctgctggccaatcttccacctgcccggtcatcagcctacagcggcgacacggcctcgacttcatgctgaaacacataggggtcggagaggagttcgaatgcttcgtcgtccggataggtgaccgcgacgtgatagtcttcgccagcgaaggctttgaccgccgcgagatcctgccagtaggtggcaagaaagaaatgcgcccattcgccctggttttcctggcgcaccagcgccccccggttgccggcgatgctctgagcgtgttctacgccggtccgctcgaggtggcgggcaaacccctcagcatgttgcaatggcacacagccgtgccaggtcctgacaatcatttgcgttctcctgtggtgataaacgtctcaccctaacatcgacaggcatttctgggggagcgcaacaatgccgcgctggccacaacacaaaattattttgccggacggggatatcctctcactctgcagtattttcgactgcggggcagcattgggccgaatattgcgcggcgagtatcactgttagctggcgcggagaaaatcgtggctcgtcagcctcgggcagtcttatcgatacacgcccaagccgcgccccttcagggcatcgccagccgatcttgatggtccgcaaagagagcgatgagatggtcggcgagaacccgcacgcgtctggatccggccaggtcagaatgcatcaccagccagagggtctgatccgcgccgatctccggctgcaggcactgcaggccgctggcccgcgccataaagtgcggcaggacgcccaatccgaggcccgcggatactgcggaaacctgggccacgagcgtattggcttcgactttacacggccggccgcgcagggtgcgcgtgatccattgggcggccggcaggtgctggtgagtttccggccaccccacaaagtccgcctcgctcagcgacaggccgtccgcgccggccagacagtcggcggcgccatagacgccaaaccccaccgtccccagccgctttaacgtcagatgcccggcctcaggcttgaccatgcggatcgccagatcggcatcccgacggtgcaggttcaccggctgcacgccgctcagcacctccacccgcagctcgggataatggtccaggagccctttcagggagggcagaataaaatgcgtggccaggttatccgaggtggccaggcgaacaaccccggcgacatgcccctgcagttgcgccgcttcgccgaacgccaggccagcgtattccagcgcctccgcccgcgcgagcagggcttcgccatcgtcggtcaggcggtagccgctctgatggcggctgaagagcggaacgttcaacgcctgctccagccgatccagccggcgggagaccgtggcaatccccatgttcatcttgtcggcggcgccgctcagcgttcccgcccgggcgatggcgaggaagatgcgcgcatcatcccaatgaaattctgctgtcatctcttttccgtttatggaaaacggatctccgttttctgctcttttttatcaattttgcagggatgatactgcacgccactcacggagacaaccaggccatccgatcgcctgctctctcctcacctgaacgtccgtgcaccgcgcggaacgctcctttcctaaggatacgcctgatatgaaagagattgctttacccctccacccggcgcaggcgcgcgtctggattgccgtcgttgcgctcgggatctgcgccttttcgatcgtcaccagcgaactggcgccggtgggcatgctcagcgccctggcggcggattttcaccagacggaatccggcgtgggcctcgccgtcaccgcctatggctgggtaggcgccctggcggctctgctttccggcgcaatgccggcgcgtatttcccgcaaggcgctgctggtcgggctgatgctgatcctcgcgctttcctgcctcgccgcaacccggtcttattcgatgttcgccctgatgagcgcccgcatgattggcgccctggcgcatggcgccttctgggccttaattggcattgtcgccgcgcagctggtgccgccgcaccggctggggctggccacggcgatcatttttggcggcgtgtcagcggcaagcgtagtgggggtgccgctggcgagctttatcgccaccctggcgggctggcgactcgcgtttatgtcgatggccttgctgtcactagccgccgctgcggtgctgtgctcgacgctgcccccgctggccgcccctgcccccgtcaggctgcgtgtttatcgcgatatcttccgcaatccgctgctcggtggcctgtatggcgccacggcctgcatcattaccgctcactttgccgccttcacctacattgaaccgctgctgataaatctgcagggagtcccggcgaccgccctctccggcctgctgctgctgtcaggggtttccgggctgctgggtaacgttatcgcgggtaagcttatcgatcgtcatctgaaggggctgattttcgctgcgctgctgctgagcgggggcgcgctggcgctccttggcgccgcccgtcttgcgccactgccgttctgttttagcgggctactgttagccctgtggggcgccggcatcgcgattgtgttcgtcggcttacagacctggctgctgcgcagcgcgggcgctgtcgcccagccggcgtcagccatttatgtggccatttttaatgccgccatcggcaccggggcgtttgtcggcggccagctgatcgcctcagctggcctgtcgggaatggtgtggctggcggcggggatcatggtgggcagtacgctgctgatcgccctgctgaaagcgcctctgcccggtcagatcggtgcggcgacggcaggcgtttagatttgcgccagcccgccgtcgacatagatctccgcggcgttaataaagctcgactcatccgacgctaaaaataccaccgtccggccaatctcctccggctcgcccagccgcccgagtggtacgccggccgccagagcatcgaacaagccctggcggtccgcctccgccaccagccctcccagacccggggtacgtaccggccccgggctgaccacattgatgcggatcccgcggtcgctaacctccagcgcccaggagcgcgccaggctgcgtaccgcggccttactggcgctatagatgctgaagttagccgtcccttttaccgccgccgtagagccggtcaaaatcaccgaggcgccgtcggcgagcagcggcagcgctttttgcacggtgaacaccaccccgcgcacgttggtggcgaaaatccggtcgacgtgcgcttcggtgatggcgctcagcggcagcatgtctccgccgccggcattggcgaacagcacatccagccggccggactcttcggcaatggtcgcaaataccgcgtcaaggtcgcttaacacggcggcgtcggcgcggatcccgcgggcggcgggcccgatgaatcttaccgccgcatccagctcctcctgacggcggccggtgatgtacaccttcgcgccctgctccgccagcgctttcgccgacgccaggccaatcccggcgctgccgccggtgactaacgccactttatccgcaagttttttgctcatggtgcatttccttggttagagtataaacaggccaggctcgcgaacgcgccccgccgggtatggaaagcactgtaatcgtcccggcgaggcggaaaaatggcctaatctgaaaaacactcttcccctcggtggataatgacctccagtaaccaggataaagcgaataatggaccggttttcagctctcaaagccttcacccgcgttgtcgaagccggcagctttacccgcgccgcggactcgctgaatatgcccaacgccaccctcagcaaaaccattcagcaactggaggcgcatcttggggtttccctcctgcagcgcactacgcggcgtatcaccgtgacgccggaaggacgggagtactatgaaaaagcccgctgtctgctggaagacctggaagagatcgacgcgtcgttcaataccgcccgcaataagccgaagggccatctacggatcgccatcggcgggtcgaccgcgtgcgatgtgctgatcccgctgctggcggactttatgacctcctggccggatatccatatcgatttgcaggtggccgataaacccgcggacctcatcagcggcaatattgactgcgccatccgcggcggtccgatggaagactcgacgctgatcgcccgtaaaatcggcgaggcgacgctggtcacctgcgccaccccgggctatcttcagcgctacggcacccccgcctcgccggatgaactacatcatggccaccggctcatcagctatctgtcgccggccagcggcagagcgtttccgtttcgctttacgcgtcacggcgtcagcaccgagctgaagacagagccccatctcggcatcaatgagagcaacgcgcatattgccgccggcgaggccggcttaggcattgtgcagacctttacctattcgctgaaaccggcgctggcgagcggcgaactggtggagatcctcagcgcctggcgcccggccccctatccttttcacgttgtctatgcccggcaccggcacgtcccgccccggctccgcgtctttattgactggctggcggcggtttttccggccgcggtgcagggatagcgcgcgttatctgacgcggagcaggtcgccgtatcgcgtggtgtagcgcggcgagagcatctctcgcttcatctgccactgctgctggatcccctggccggcaaaatagagcgcccccctgccgtttttcgcattcagctgatcgagaacctgcatcagtctggcgctgttgtgccgcggagcaagctcgtcgaacagattcagctgggcgacgccctggctgtagaaatcgccgagcatcacgccggccttctgatagcgatgccccgctttccagatggcatccagacagctcgtcgccgcggcgataatatctcgggagtcctgggtcggcgtcagcagctttagcgaggcgctgttgccgtaatagggttcattcagcgcgaaggggctggttttgacaaaggcggagacgaaccggcagtactgatgctcaccgcgcagcttttctgctgcccgcgcggcatagctgcagatcgcctggcgcatatcctcataggccgtaatccgatccccgaacgaacggctgcagataatttcctgcttagcgggggcaaactcctccagcgccaggcaaggctcgccgcgcagctcccgtaccgttcgttcgagcaccaccgtgaagtgcttgcggataaagcggatatcgctctccgccagctggagtaccgtgccgatccccatcgcttcaagctttttgccgatccgccgcccgatgccccagacctcgctcaccggcagcagcgccatcagctttcgctgccgctgcgggcaggacaagtccactaccccgcccgtctgccgcggccactgcttcgccgcgtggttggccagcttcgccagggttttggtcggggcgatgccaacgcccagcgtcagatgggtacgctgcagcaccgtggcgcggatttcgcggccaaaatcggtcagatctctacaatgacgcacaccgctgacatcgcaaaaggcctcatcgatactgtaaatttcgcagcgcggggtgagctcttccagggtggccatcacccggctggacatgtcggcatacagctcataattactgctaaacgccacgacgccgtggcgaagaaacgcagccttctgcttaaagtagggttcgcccattttcacaaacggcttcgcctccgccgagcgggcgatcacgcagccgtcgttgttcgacagcaccaccaccggccgccccttcaggtctggccggaaggcggtctgacagctggcatagaaggcgttcacatcacaatgcgcgaacatgatcagcccgccgccttgatgatgtaggttacgacgccgaaaatatcgagcgtctcctcgcggccgaccacgatgggcgaataggccgggttcatcgggttaagctgcacccgcggcagaagctgcagcttctttaccgtaaactcgccgccgacggcggcaatcacgatatcgccatgctccgctttacgcgcgctgtccaccaccagcaaatcgccttcgtcaatgccggcatcgatcatgctgtcgccagcggctttgacaaaataggtcgcgctgggatgctgcaccagcagctcgttgaggtcgattcgcttctcaacatagtcctgagccgggctgggaaagccgcactgcaccaggtcggcaaaaaagggaaaggagacaatctgacgtagctcaaccggcgtgtaaacgttcatttttcaacccaccacacaatactgaatatatatacagtagttttgccagttttaccggtcaatatcggctccagctatcaatcgccagcactgaaataactccttgatgtcaataggggtcttcttcagcgccagcgaaccgtttgctgcttttgcgcgcagcccgcccgccgcgcgaggtggtagatacgcagcgccgcggcattcgcttgacactgtacattaatacagtaaaactatcgcccgcgatcagcatacagaggacagaagatgtttgtggaactgatttatgacaagcgcaattttgccgggctgccgggcgccagagaggccattcttaacgagctgaccaaacgcatgcagcgcattttcccggaggcggaagtgcgggtgaagccgatgatgacgctgccggcgatcaacaccgacgccagcaagcatgaaaaagagctgatcagccgcacggtgcaggagatgtttgaagaggcggatatgtggctcactgaagagtgatcccgcccgtcagtcgcggcgaccacctctttaagagctttcccggatgtggcagagccgcgggcaacagtacaatagcggcggttgcagactggcaatgcaaccttcgctcacctgctggctcttgcatacggccagcaggtgagccctacctgtctcccctcatcgcctcacagcgtctccggtagcgccgctataattctatccactagcccgcgatgctgatggaccttcccgcatttaacaatgatctgcctggcgttgtcatagcccggggcccacagccggttattaagcagaacgtccttatagaccgcgatcagcggtttgttccacgccgccgccatgtgcaccaccgaggtgtccggggagataatcagctccgcctgggcgatcagcgccatcgcatggtgtaacgtgttaaatgggtttatcaccacctccggcggcagcgggatgcggatctcgcgccggtgatcgagcagaataaccgcgctccccgggtggcgggccagcagtttgtcgagcagttccgccagctgcgtctgcgagagactgcggtcggcatggccggcaaaaatattaatcaccaccgcttttccgcttagcgacgccagatactgcgccacctcctgcataatcggcccgggcaccgccaggtcgtaagcgtccagcccgcgggtgtccagttggagataatcggcgatcagctcgaacgttttcgtcacgtgccagcgctggcagtcaaaatcaaaagagtgggagtagtgcttaatcgatggccatttattaaacccgagcactgatttggcttttatttgtcggaaaagccgcaggcgatgcacgggaatatcgaacagcgaagggtcaataataatatcgtacttattattagccagttcattaataacgtcgcgaggaacgttatgattaaatttacgcaaaaaatcagcggacgtgaccgggtcagcttcataaatatggcggatccgcgggttataacgcatcacctggctgttagaggtcgtcagcaaaaaatcaacgatatagcctgactgatgcaggcatttcaccagcgcggaatccaccactacatcgccgaccgccccctcattgcgcatcaacaggacggttttcgcagacgacaaatctaccggctgacggcgtcggcgatcccagagcgctttcgccacccccacccgcagggcattacgtactttcttagtaaagtaattccgccgtctgttgagctcccttattttattaaatttcttgcgtggggaaccctgcatggttgcatcgtgcatcatcctaacctcattacggcaattattaatattctgtgtcgtccgatagagactgagcgaaataaaaaaagttcgattgaaaatgaaaatcattcttttttttatttacaaaactcatctgcgcctgcgggattgcaccacagcactgtgaagtaataatgagcgaatggtgaatttcccggcccaccgttggcaggccggcgcaacagcgctaagctggctgctttatgatgtcaggaggacgctatgcttgaagcagtagaaggtaatatccaccagcggctgtgcgcgctgctcgacgagcaccgggcccgctaccgggtgatggcgcacgaggcggtcggtcagtgcgaagccgtctcggcaatccgcggcaccgcgcttggccagggcgcgaaagcgttagtctgtaaagtgcaaggaaacggcagcaacgg

SEQ ID NO: 194 - DNA, 19457 bp, Unknown
  source: /note="Description of Unknown: MKP2_2161_1 Mutant Bacteria sequence"
gcagcgcgctgatgacgatcgccagcgtcagggcgccgaggcgcgccagggacagcgccagcccgaggttacgcgccaccccgtcatcgagccccatcagggtcagcggccgcagcagcagcaaggtgagtattgccccgccaagcagctgcggccacaggcgctgcgccacgctccagtcggtctgcgtcagcgtcccggtgctccacaggaacatgctttgcagctggtcgtgatggaaaatcaccatcagctggttaagcgcgccacagtaaaggctgaccaccagccccgccaggatcagcgttaccggcgacaggcgcttgccccacgagacgccaaacaccagcgcgcccaccagacaggccccggccagcgcggcgaattgcgacgccagcacgccgggaatagcccataacgtggtgaccgttatccccagctgcgcgccggtggcgacgccaagggtggtcggttccgccagcggattacgcagcacctgctggaacaggacgccaaccagtcccagcccggcgcccaccagcagcgcaacagccagcctcggtaacaaactgtaatgaaacagcatttgggcgatatcatcgacatccggctgccacagcgcctgccgccactgcgcatagggcaaggcgacattgaggttgacgatgctcagcgcgaaggcgacgcccagcagcccggccagcaggataatagctaacggcgagagacgcgtattcatgccggactcccctgggcatcagccagcacgcgggcaaaatgcatcgctgacagcgtcgcgccgtagaaccagaccgccggaacgcgctggaagcggcccgcgcgcacgaagggcatcgcctgccatagcggcgtcgccagcagttgagccatatctcgctcattgccatggtcgaaacagatgacatcggcttcgttaaatgccgccagcctgtcgatgccaacgctaacgcttccccagaatgccgcttcgccgtgccaggcgtttttaataccaaagcgatcaagcacctcctggaacaggcagttttcgccaaacaccagcacgtgccggggatcgagcagagagatcatcagcagcggacgatcgccgcgcccggcaaaacgcggacgcaggctctccatcagcgcgtcgaactccgccagatggcgcttcgcctgctgcgttttgcccagcagatcggccatttccagtagcgaacgctgggccatcgccagcggccgtttgccgtcgctgaaggtgaaaccgcggccgggcgcgatacgcgccagcttctccggcgacgggccgtagcccgccgaccagacgataaacgacggtttcatctgcgtcagcagttcaaggttgggttcggtacgcagaccaacatcgatcaccgagtcgggcagcgcgggttcgttcacccacaagcgatagttgggaatatcggccacgccatagggcgtcacgccgagcgccagcagcagctccgcgggcagccactccagggcgaccacgcgctgcgggtcgacgtcggccgcctgcgcgccgcgcatctgccacagcagcggcgagagcgccatcgcgatcagcaggcggcgtcgggttatcagagttgggttcatcatcaatagacaaagcttaccggcgccgcaccggccgggtgtggcaggatccccatcgggatgccatagatctgttccagagtgtcgctgcgcatcagttccgccggcgtcccctgagcaatcatttctccgccgcgcagggccaccagatagtcgcaatagcgggccgccatattaatatcgtgcaggacggcgatcaccgtcaggccgcgctgctggctgagacgatgcaccagcgccagaacatcgacttgatgagcaatatccagcgccgaggtgggttcatcgagcagcaggcagcgactgtcctgcgccaccagcatggcgatccacgcccgctggcgttcaccgccggagaggctgtccaccagacgatgagcgagcggcttcagccccaccagcgcaatcgcctcttctactttctcacggtccgctgcgccaaagcgacccagcgcgccgtgccatggatagcggccgatcgccaccagctcgcgcaccgtcataccttcggccggcggcagctgctgcggcagataggccactttgcgggcaaaggctttgctgccccagctctccagcggctgcccgtccagcagcacttcgcctgcggagggcggctgatgacggccaagcattttcagtaacgtcgatttgccggagccattatggccgatcaggcctgtgactttcccggacgggaaggtgagcgagagcggatggagcaatgtgcggccaggcacacggaaagtgacgcgatccagcgcgaaggtggtttctgcgtgcggagtctgttcctgcatagcgataacctgatagagggcgcggcgaaccgcgcccgtaggtggttagaaacggaaggtggcggtggcgacgacctgacgtccggcgccccagtagcaggcgtattcgctgtagcaactggagacatattcgcggtcgaacaggttgttgacgttgacgccgaccgacgatcccggcaggccaaagcgcgccagatcgtatttcaccgtcgcatccatcagcgcataaccggccacactaaaggcatcatttttcttaccggtgctggtgtcatttttgtagtagctgaccgttgaaccgatatagcgcgccccggccccaatcgtcagaccactcagcgcggtttcgtggaaggtataatccgcccacagggaggccatgttacgcggcacttccgccggacgtttgccgttgaacaccgtatcgtgagtgtactccgcatcggtgtagctgtaggctgcggtgacgttaatattagcgttcaccgccgccttcgcctccagctcaaggccgcgggagcggatctcgccggtctggatgctgaacgcctggttagccggatcagccgtcaggttcttgtctttggtcagctgatagaccgccgcggtgaccaccaccggcatatctttcggcacgtatttcacgccggcttcatactgcttaccgcgcgacggatcgaacggctggccgcggctgttggaacccgataccggttcaaacgattcgctgtagctgaagtacggagagatgccgttatcgaacaggtagttgatgccgccgcgccagctgaactgctggtcgtgattctccgccaggctgttggtggcgcgggttaacgttgaggtcgtggcgtaatcgtaacggccgcccagggtcatcacccatttatcccactccatctgatcctgcgcgtacaggccggtctgctccatccggttgaggaccgcgtacgggaaggtgacctgaatattcggattgccgtactgcggattgctcatgctgataggatccgccgtcccgtagtcggcatccacatcgttacgcatccgcgagtagtccacgccggtcagcagcgtatggctgaccgcgccggtggcgaaatcagactgcagctgggtatcgacggtgaaggtgttcaggtgctcgtcggagcgcacgtaggcgcgattcatgtagcccggcgcgacatagccgttgccgtataccgaacgatagagcgtatgcacatcggcatagcgcaggttctgccgcacggtaaaggtgtcatcgaactgatgggagaagctgtagcccaccatcttctggcggcgggagattttattatcggactcgccttcgttgaaatcggtcggcagcttgtgcgccttaccgttggcgtcgtaatacggcaccacggtgccttcgcgcggcagccagccgtagtagcccgcatccgggtcattctggaagttgctcaggaaggtgaagtcggttttatcgtccggacgccagctaaaggagggcgccaccgcgtagcgagtcgatttcgccatctgctgctgggcatcctgactgcggccaaggccggtcaggcgatacgaccaaacgccggcatcatcaatggcgtcgctaaagtcaaacccggtctgccacagattgtcggtgcccatcttaaactgcacttctttcagcggctcggtagtcgggcgcttgctgaccatgctgacgataccgcccgggttgctgttgccgtacagcaccgaggttggcccgcgcatcacttccacacgctcgaggaagtaaggatccatggagacttcagagtagttattcccctgcagcttcatgccgtccagatactggttggtgttgacggtcgtcgaggtggtgaagccgcgaatggtgaccacgtcataggtggtcgaactgccgcgagtggagaagacgctgggcgtataggagagcgcctcttttaccgtcgtcggctggcgcatctccatctcctggcgcgtcaccaccgacacagactgcggcgttttttcaatcggggtatcggttttggtcgccgtggcggagcgttttgccgcgatagtcggcgccggtccccaggcgctttcctgggcggccggggcggcaacgacggtgatggtttcttcttgcttcggttgttctgctgcctgtgcgtagacagacatgccgctaaccgccgtggctactacagctgcgactttacgcagcgagtgatttggctgagcagtttttggacgcgccatgggtatatctctgatgaaagtgaatgataacgtaaacgagaattattattatgacgggcgatataataggcgaaacgtcgaaggcaaggcaagcgatatgcctgtcgccgccggtcgaaggctgaattaataaccagatagttattatggagttaaagagccgttaacttttttacaggcataaaaaaaccccttaatactttcgtattaaggggtctggtcgtgcggtcaaaatcagttactgccgaacatatccttgatccagcccgcgacgccgtcgctcttttcctgctgcttcggcggctgttgctgctgttgctgttgctgctgttgctgctgttgctgctgttgctgctgttgctgctgcccggactgattaaacggatttttcgcttcctgttgctgcaactgctgctgttgcatcatttcgccctgacggcacagcgcatccggctgcgtggtccagaccggcagcgaacgcataccaccgctgcagacgaagttgccgttgctgtccacgcccatatcaaccacgtcttccggcaccgtcagcaccagcggcgttggcgtctggttcgccagatagcgctggtaaatcgacatcgcgccgctggcaccgtacagtttggtcggctggttattgtcgcgccccacccaggtgatggtcacctgactaccgtcgatgccggcgaaccaggtatcgacgttattgttggtggtcccggttttccccgccagatgcaggcccggatacttcgcccccagctgacgccccgtaccgcgctgcaccacctgctgcatagtccacagcgtcatgtaggccgcctgggcaggcaccgcgcgctccgcctgcggatagctctggtagagcacagtgccatcttcggcaatcactgaccgcagcgcggaaagcggcgcacggttcccaccgctggcgatggtctggaaggcctgagccacttcaatcggcgtcaggttcagcgcgccaagcagcatcgacggcaccgcgttgagctgattcttcggcgcccccagtttagtccaggtatcgactaccgccggcaagcccagcgccatcccgaggttaaccgtcgggacgttcatcgagcgagtcagggcatcgaccagcatcacctgaccgctgaaacgacgatcgtcgttctgcggggaccacgtctgaccgttggacaggcgaatcgtcaccggcgcatcggcgatccaggtattcaggcgatactgattcggctggctcagcgcggtcagataggtcgccggcttggccagagaaccaatcgatcggcgggcctgcatcgcgcggttataaccggcgaactgcggctccgcgccgccgaccatcgcccgcacttcgccggtgaagcggtcaaccaccaccatggcggtttccaggtctgccagcttacgctgtttcttcagaaccgggatcccttcggaggccgctttttccgccgcatcctgcgccaccgagtcgaaagtggtgaagatcttcacgccggagagatctttcactttatcgcccagcttcgcctgcagttcctgacgaaccatctgcataaacgccggctgcggtgaaatcactccgccgcgcggctgcacgcccagcggacgggcgctgagcatgtcgtacagctcctggtcgataacttgctgctgctgcagcagacgccgcaccagattgcgtcgttcaagggccagtttcgggttacgccacgggttatagaccgacgcccctttcaccatccccaccagcagcgcctgctggtcgaggctcagctcttccaccggacggccgaagtaatacaggctggccagcgggaagccgcgaatttcgttatcgccgctctggccgaggtacacctcgttcatatacagctcaaggatgcgatccttgctgtagcgggcgtcgacgatcagcgccatatacgcttcgttggctttacgccagtaggagcgttcgctggagaggaacaggtttttcaccagctgttgggtcagggtactcgccccctgcaccgttcggcctgccgtcaggttcgccagcaccgcgcggccgatggagtagagactgatcccatcgtgctcatagaagtggcggtcttcggtcgccagcagggtatccaccagcagatcggggaagccgctgcgcttcacgaacaggcgctgctcgccgttcggcgactgcagcatggtgataagacgcggatcgaggcggaagaaaccgaactggcggttattatccatattctcgatggtctcaagatggtcgccgtcgaaagtaagacgcgcgcgcacctgcccttccttactgtccgggaaatcgaacggacgacggatcatctcgatgctgttagcctgcacggtatattcgccggggcgcgtcatcgcgctgacctggcgatactgcgtggcgttgagcagacgcaccatctcgtttttgctgatctgcatgtccggctcaaggttgaccatccggccatagaccgcggccggcagctcccagactttaccgtcaatgcggctgcggattttctggtcgaggtagacgccataggcggcaatcagcaccgcgaagacaatccccagcttgaccagcagccacagccagctgcgcttccgacgaggcttgccacctttgcctttggcttttctcggcaccggtttctcatcctcataatcatcgtcatcatactcatcgtcgtagtcctcttcccggacccggcgacgggtgactttctgtttagtcggacgtgagggtcttcccttacgtccgataggctcgcggtcatctcccgccatgctttttctccgcaacgttcaggcgcaaaggcctgattctcaatacttcccctgttcagaggaagaagaaatctctcaaattaacgtccaggctgcttatccttcggacgacaacctgctggcaggcaggacgcgccgccagcctttcagagggttggtttgcttcatgttacatgatactaacaataaaaattcaccataaaatcattgtgttaaacgcatcatcggcagaataagtcagaacatagcacgtaatgttcagggcatacaggatagcactaaaatgcgacattcttaaccagcattttacctcctgcgcacgtaacaagatgggaaagagtatgttttttaataacataaaaaacggcgcgcttcctgccggtcaacgcagtggcatcatccgcggatgaaaatatattttcccagcgccaacgtttattattgataaaagtaaagtcgattaagcgcctttccgttgataaaaatgagagcctgttaacatttatgcagaataatattttatgatgacaccagggaaatatttgttaaactagcggccagtgattcattattttgattactctatgatgcgtattccgcttatatttccgctttgcatggtagcccttctctctggctgccaacaaaaacctgcctcaacgctcagcccggccatcagcagccaggcgcagctcgagcagctctcgtccgtggcggccgggacgcgctatctcaagaataaatgtaatcgtagcgatctccccgctgatgaaacgatatatcgggcagcggtgaatatcggtaaagcgcgcggatggggaaatattgacgtggcgacgttaagccaaaatagcgaccggctttaccaacagctattacaggacagtaccccggaagccacacagtgcaggcaatttaatcgtcagctcgcgccatttattgccagcttgcgcagcgactaagcgaaatatcctcagcgcgccggttattgtgcgcgcttttattcctctttcggctcctcgtcaatttttccgcccggccagtcctccagcgccgcgagggtaaaggtcgtgccgttgaagctgaagatcgtcacatcctgctggatctgctccaccaccagattgggcaggggtgaatcgccctccgtccacgctttgccgtttaacacaatgctgcgcttttccggtagcgaggcatagacatgggcgctgtagcgtagaggcggcagcgtatcgctgtccacttccggcgccgcgggcgcgctggcttttgccgccggcggcggcgtctttggcgcggtctccccggcggcggttaacggcaaaagcgccgcatgagccaccggcagaggcagcgtttgcggcggtgacggatggcgccactgctcgccgccaaaccagccgagcgcgataaataatccggcgtacagcgggataatccagccggggatctgcaccatccgaccgcgactcaccggcgcgtctgcctgcgcggacggcggctgatgcgccaccagcggcgggatgcctctttcactatcatcacgaacaatcacaaccgtctcctgttccctcacggtgcagagaaggcgcccttacgggcgccccagactgctgacaaagtgcattcttcagagattgcccggcggcgctacgctagtgcgggccgacagataaatgcataactgtttgatattgcagtctttcgtaggccgggtaaggcgtaagccgccacccgacagaaaggcgagcacaataacgaaacaggtttgtcatcagccagaggcgcccttacgggcgccccacgttatgttatttactgctcaccggcaggccagcgccctgcgactcgccctgcggcaactcgagaacggcaaccgaccaggccggcagcgtgaccgagccgtcagcggcaacctgcacgccgctcgccagcgaacggtcgcctgccgcctgctggatggcgctcagctggagcgatgtgccggcgaagtcctgcagcgtccggctttccggtgcggcgttgatcgccaccacgatgccgtcgacacggctgtccagactggcgccagcctgcatcccatcatcgatggtcatcaccagcagacccgtctgctgatcggcgccggtgttgcggaagtccacgcgcttcatcaccgtcgcgccgtcaccgagggtaaacagcggagacgatttacgcagcgcggtcagctcctgataaaacgcggtcatctgcttgagctccgtttcacccggagtagccaccgcgtctttcacccgggcgataatgtcatagttgctgccatcatcgctgctgcgcggcataccgacgttgtagttgttgtcctgcagggagtagtccacgcggttaaaccagtcgccggaatcatacgaatcgcgggtaaaggatttagagcgcagcagctccgagccctgctggtcaaaggcgatcccctggccgagcatcaccgtcgccagcgacaccgcctgcatccggacgcgggtatcgagatccgcctcctgagcggctttatagctgatcatgtcccacagcgtctggttatcgtgttttgacacatagttcacgacttccgtcggatcagccgcatagccgcctggcgcgccgttatagtcaatctcgctgcctctcttcaccgcgccgtctttgtcgatcagcacaaagtccgcaaggttaccggccatgccgagacgggtcagatcggcgaggtgacgcgcctgatcgtcggtcagggtggtcagctcattcggcagaacgccggccccgctgcccacgccctggttctggcgtaatgcgtcaccggagtcgaacggcccgccgccgcgcacggcgtcgcgcagacgatcggagaacgtgccgatcccggtgcctttgagattgatttgcgaggcaatttcaaagcgatcgctctggttggaatcccagccttcgccaaagaagtagatatccgggttcagcgctttaatgcgttcccaggccgagaggatctgcgctttcgggtggtagcccatcaggtcgaagcggaagccatcgatcttataatcggtggtccataccgccagtgaatcggcgataagcttggcgaacatccggtgctctggcgccgagtcggagcaacaggtagccgattccacgctgccggtggtttcgttcagacgctggtagtaccaggggacgatcttatccagtaccgaggtgcgatcggtcgggccggcggcgttggtgtggttgtacaccacgtccataatgacgttcattcccagatcctgcttgatcgcctgaatcatggtgcggaactctttaatacgcgccgtgccttccggatcggtggcgtaggatccttccggtaccgtgtagtggaacggatcgtagccccagttataggagtcggtctgcgccaccagcgtattcaacgcctgcacctgcgggttatccttgctgtcgttctgcttcagctgggtcagcacctcttcgaccgtcgaaccgctgtcgcaatagcccgcgaactcgctgctcttcaccgcgctattgacctcgcacaggcggctgaacggctgctgaatatcggcgaccttgtcgctgaactcattgaccgtcgccagatcgaagaccggcagcagctcaatatgggtcacgcccgaggccgacagctgtttcagatgctggaccatattgctttcctgggcggtgagcgccagatacttaccgcgcagctccgcaggcacggtttgatcccaggcggagagatcgcgaatatgcgattcgtgaatcgtcattttcgccagatcggctttggttttctgcgcgtgcggcatcgtcagcccgtcccagccttccggcttcagcgcgctgtcgttgagatcgaccacctggctgtactccgagttggtcgacaaactgtgggcgtagggatcggtcacttcgtactgctcgactttacgcgactgcgggtggtagaccgtcatcgcgtagcggtagaaggcgcccttcaggtcgcttcccccctgccaggaccaggcgccggaggcgctatcgcgggtcatcgggtgactggctatcactttcttgtccgcgctatagatcaccagctcgacctgctgcgccgtgggcgcccagacgcggaaggtcacgccgctatcggttagctgggcgccatagctcagcgcctcggcggcggcggcataggtatcgtccagcacgccggcggtctgcacctgggtggctgagctcaggatcccatcgctttccgcggctatcgccaccgtctcgccctgcagcaattcatcgacgttaacatcatccggcagtttaaaggctggatagctggcgagatgcgggaagcgcatgcttacctgctggctgacggtggtgggggtcagcttgacatatttatcgctaaattcgccgttactgtcggcggccaccttactgctgtggctgtaatagaggcgcacaatgggtttattttccccacccggccacagcagagtagtcttatcgacccagtgcgcatcggccagcgccacgccaaaggcggcgcggaaggcgtcggcgcgggagtcatagaccgcgctgttgccggcgatgaccgataccgtccgatcggtgaaatcactgaaagagacgcgcaggtcgctgtcgataagcttattggtgccatcgcggacgataacgttgatgcatccgctctctttagtcagcgggatcacccaataagggccatatttgtcgctgccggtcggggtggtgctgacatcattccagtccgccaccggcgcgctcagcgcgtcacaggtttcgttgtcccataaatagaggtttttcgtcgcatagtcggccggcgtgctgctggtgatgccggcgatatcgacgagatgaatgacagcttgcctggcggaagcctgcaccgcttcgcctgggacggcaacgtccggtaagcggacgacgacatcctgcgggtcgggcgtgccgggagtgcctgggttgccaggattgcctggtgaacccggtgagccagaggtagaagaggaagagctgttatcacagccactcaataatactaacgatccaagaaatagggcatgacaggtatatctgagcattcgatagtccctaatatgcttattaaattataaaaggtaagaaaggatgaatatctttacagcgcgctaattagatatttttgctttcccaggcgcaatcatcccccacaaatgagcggggggcgtaggaagccgggggagtaaatcaataaagggaatgacgacccgaaaccgcaaactgattatgattcgccacgcttatcgccactctccggcaataaataattcaaaagccaataatcacctacctgtttcggtagggtattacgccaacgtgcagaaaaataaattagcaaaggaattaaaatgccagtttctgtgatgaggttaacaaatataaataaagggataattaaattattaccacaaattgtgacgctcatcatattaataaccgctatcccacagctggcgaaattaacctggcgcgtggtattccctgtgagtcctgaggatatttccgccctaccgttaaccatgcctccgccggcagatccggaattaaaaaatgtgcggcccgcatttaccctgtttggcctggcggtgaaaattagccccacgccaacggatgctgccagtctcaatcaggtgccggtttccagcctgaagctacgcctggccgggctactcgccagcagcaacccggcgcgctccatcgctattatcgaaaagggaaatcagcaggttagccttagcacgggcgatcctctcccagggtatgatgcgcggatcgccgccattctgcctgaccggatcatcgtcaactatcaggggcgcaaagaggccattttattatttaacgacagtcgcgcgccgtcgccgccgcccaccgccgcgggcaacccgcccctcgtgaagcgactccgcgaacagccgcaaaatatcctcacttatttatctatttcgccggtactcagcggcgacaaactgctgggttatcggctgaacccaggcaaagacgcctcgctgtttcgccagtccggcctgcaggcaaatgatttggcgattgccttaaacggcatcgatttacgcgaccaggagcaagcgcaacaggcgctgcaaaatctggccgacatgaccgaaataacgctaaccgttgagcgggaaggccaacgacacgatattgctttcgcgctgggggatgaataattgccaaccatgaaacgcctgcgaaaaatgctgcctgcgctgctgatattaaccccgctgctattttctccggccgccgcggaggaattttccgccagttttaaaggcaccgatatccaggaatttatcaataccgtcagcaaaaacctgaataaaacggtgattatcgatcccagcgtacgcggtactatcaccgtgcgcagttacgatatgctcaatgaagaacaatattatcaattcttcctcagcgtgctggatgtatatggcttcgccgtgatcaatatgaataacggcgtgctaaaagtggtccgcgccaaagacgccaagacctcggccgtgccggtcgccagcgcggccgcgccgggcgaaggcgatgaagtggtcacccgggtggtgcccctgaccaacgtcgccgcccgcgatctcgccccgctgctccgccagctgaacgataacgctggcgccggcagcgtggtccattatgagccctccaacgtactgctgatgaccggccgcgcggcggttatcaaacgcctgctgaccattgtcgagcgcgtcgacaacgccggggatcgcagcgtggtgaccgtgcccctttcctgggcctccgccgcggaagtagtcaaactggttaccgagcttaataaagataccagcaagtcggcgctgccgggctcgatggtggcgaacgtggtggccgatgagcgcaccaacgcggtactggtgagcggcgaaccaaactcgcgccagcgcattatcgccatgatcaaacagctcgaccgccagcaggcggtacagggtaacaccaaagtgatctacctgaagtacgccaaagccgccgatctggtggaagttctgaccgggatcagcagctcgctgcagagcgacaagcaaagcgccaggccagtggccgcgatcgacaaaaatattattatcaaagcccacggccagaccaacgccctgatcgtcaccgcggcgccagacgtgatgaacgatcttgagcgggtgatcgcccagctcgatatccgccgcccgcaggtgctggtggaggcgattattgccgaagtgcaggatgccgatggccttaatctcggtatccagtgggcaaacaaaaacgccggcatgacgcagttcaccaatagcggtttgccgatatcgacggctatcgccggcgccaaccagtacaacaaagacggtaccatcagcagctcgctggccagcgccctcggctcgtttaatggtatcgccgccggcttctatcaggggaactgggcgatgctgctcaccgccctctccagcagtaccaagaacgatattctggccacccccagcatcgtcaccctcgataacatgcaagccacttttaacgtcggccaggaagttccggtattaaccggctcgcaaaccacctcaggcgacaacatcttcaataccgtcgagcgcaaaaccgtcggcattaaactgaaggtgaaaccgcagattaacgaaggcgatgcggtgctgctggagattgagcaggaggtatcgagcgttgccgactcggcctccagcaccagcagcgatctcggggcgaccttcaatacccggacggtgaataacgccgtgctggtcggcagcggcgaaacggtggtggttggcgggctgctggataaaaccgtcaccgataccgctgacaaagtgccgctgctcggggatatcccggtgatcggcgccctgttccgctccgacagcaagaaagtgtcgaaacgcaacctgatgctgtttatccgcccgaccatcattcgcgatcgcgatgagtaccgccaggcttcttccggccagtacaccgccttcaacaatgcgcaaactaaacagcggggtaaagaaagcagcgaagcgtcgctcagcaacgacctgctgcacatctatccgcagcaggagacccaggccttccgccaggtcagcgccgccattgacgccttcaatctcggaggccgcccatgacgccagccgccgaacgccgtccgctgttgcccttcgcctgggcccgcgcgcaccatcttgtgctgctcagcgacggcgaatgctgcgaagcgctgtgccgccccgataccgccgcccgggcgctgctggaagcgcgccgcctggcggacgggccgatgcgcgtcagccgtctggcgccggacgcgttcgagaaagtgctggtgctcagctatcagcgtgattcggcggaggcgcaccgcatgatggccgacatcggcaacgagctcgacctctataccctcgccgaagagctgccggacaccgacgatctgctcgacagcgaggacgacgcgccgatcatccgcctgatcaacgccatgctcaccgaggccatcaaagagaaagcctcggatattcatatcgaaacctacgagcgccatctgcagatccgctttcgcgtcgacggcgtgctgcgcgaaattctgcgcccgcagcggcggctggccgccctgttaatttcgcgcatcaaggtgatggccagcctggacattgccgaaaagcgggtccctcaggatggccgcatggcgctgcgcatcggcgggcgagcaatcgacgtgcgcgtctccaccctgccctccagccacggcgaacgcgtcgtcctgcgtctgctggacaaaaacagcgtcaacctggatctgctgacgctgggcatgccgcccgccctgctcgatcgggtcgatgcgctgatcgcccgcccgcacggcatcatcctggtcaccggtccgaccggctccgggaaaagcacgacgctctacgccgccctcagccgcctcgacgcccgggagcgcaacatcatgaccattgaagatccggtggagtatgagctggagggcataggccagacccaggtcaacgccaaagtcgagatgaccttcgcccgcggcctgcgcgccatcctgcgccaggatccggacgtagtgctggtgggcgaaatccgcgatggcgaaaccgcccagatcgccgttcaggcctcgctgaccgggcacctggtgctgtcgaccctgcacaccaacagcgcgctgggcgccatttcccgtctacaggatatgggcgtggagccttttttactctccacctcgctgctggcggtgatgtcgcagcggctggtgcgccaactctgcccgcactgccgtcagccctggcaggcggatgccaacaccgcccggcagatggcggtcccggtcggcgcgcggctgtggcagcccaaaggctgtccggagtgtaatttcatcggctatcgcggacgcaccgggatccatgaactgctgctggttgacgaccgcgtgcgcgccgccatccaccgcggcgagaacgagatcaccctgatccagcagctggggccagcctggcaaaccctgcgccatgccggacgcgacaaagcgctggcggggatcaccagctgggaggaggtgatgcgggtcaccgaacagcaaacgacggaaagcgtctaagatggccctgtttcgctatcaggcgctggacgcgcagggcaaaacccgccgcggccttcagcaggccgactccgcccgccacgcccgccagctgctgcgggacaagggctggctggcgctggaagtgacaactgccgacccggcgcggcgactgtgggccggcggatcccttacccggcgtaccagcgccggtgatttagccctgctcacccgccagctggcgactctggttgccgccgggatcccgctggaaaaggcgctcgatgccgtcgcccagcagtgcgaaaagccgtcgctaagaacgttaatggccggggtgcgcagcaaagtgctcgaaggccactcgctggcggaggcgatgcgcggctatcccgcctgcttcgacgggctgttctgcgccatggtggcggccggcgaaacctccggccatctcgacggcgtactgaaccggcttgctgactataccgagcagcgccagcagctccgcgcccgcctgctgcaggcgatgatctaccccatcgtactgacgctggtcgctatcagcgtgatcgccattctgctctccaccgtagtcccgaaagtcgttgagcagtttgtccatcttaaacaggccctgcccttctctacccggctgctaatgagcctgagcgacatcgtgcgcagcgcgggcccctggctggcgctgctgtcgttactggcgctgctggcgctgcgctatctgctgcgccagcccgcccggcggctcgcctgggaccgggcgctgctgcgcctgccggtcatcggccgcgtggcccgcagcgtcaacagcgcgcgctacgcccgcaccttaagcattctcaatgccagcgcggtgccgctgctgctgtcgatgcgcatcagcgccgacgtcctcagcaacgcctgggcgcgcagccagctggcggcggccagcgaatcggtacgcgaaggcgtcagtctgcatcgggcgctggaatccaccgccctgtttccgccgatgatgcgctacatgatcgccagcggcgaacagagcggagaactgaccgccatgctggagcgcgcggcggagaaccaggaccgggagctgagcgcgcagatccagatggccctcagcctgtttgagcctctgctggtggtcaccatggccggcatggtgctgtttatcgtgctggccatcctgcagccgatcctgcaactgaacacccttatgagtatgtaactgtattaatggagaaaactatgcaacggcaacgcggtttcacgttactggaaattatggtggtgatcgtcattctcggcattctcgccagcctggtggtgcctaacctgatgggcaacaaggagaaagcggaccgccagaaagtcgtcagcgatctggtggcgctcgagggagcgctggacatgtataaactcgacaatagccgctaccccaacaccgaacagggactgcaggcgctggtgaccgctccggccgccgagccgcatgcccgcaactacccggaaggcggctatatccgccgtctgccgcaggacccgtgggggaatgagtatcagctgttaagcccgggtcagcatggcgccatcgacgtcttcagcgtcggcccggacgggatgcccgacaccaatgacgatatcggcaactggaccctcgggaagaaatagtgtctcagcgcggtttcaccctcctggagatgatgctggtcctgctgctgatcggcgtcagcgccagcatggtgctgctggcgtttccctccgcccgcacccaagaggccacacagatcctggcgcgctttcaggcgcaactggattttgtccgcgagcgcgggcagcaaaccggtcagctcttcggcattatcatccaccctgagcgctggcagtttatgcgcctgcagcctgccgacgatagcgccccggcggcggctgacgaccggtggggcaacgcgcagtggctgccgctgcaggccggacgcgtcaccacggcggaaaccctcccgcgggccaggctgacgctgcgctttcccgacggccaggcgtggacgccgggcgagcagcccgacgtgcttatttttcccggcggtgaagtcacgccgtttcagctgcgaattgacgccgcgacgggcggaaacccgtcccttatacccatcctacgctccccaccagcgaaccagagtagctcgcggggggggccgcagcccgaacaaaccaaactccctcaggggaccaga

SEQ ID NO: 195 - DNA, 18034 bp, Unknown
  source: /note="Description of Unknown: MKP2_2161_1 Mutant Bacteria sequence"
cgctgttttctcccgcggcgcgggctttttcacgttccagaatcagcaggcagaacggggtcatcagcaccgagccgcaggcgatagagaccgctaccgacagtgaggttgacgcgccttcacccagcacgctgccgaggatcggcagacctaacgcggcatagtttggcagggcgacggtgagggtcagcaccgcggcatcctgcggcgtgcgtttgaacacgctggtggcgaggaagtagatcgcggcataggtgatccacatcgcgccggtcaacaccagcaccaacggcgactgggcgacgataccggcccacggcgtttgtaccgtcgcgctaaacagcgtggcgggtaaggcaaaatccattacaaaaatattaagcagcgagacgtttttgttatctaccatcccggccttaccggcccagaagcccagcagcataatgacgaaaatcggggcaagagcatgaataatcacataagtcataaatcacctgtaaataagatagagtactggcgcgattgttattttttctaaaagccgtcccttcccggcgcggttattacgcgctccgggggacggcttccggcaggttttcttctactacttacgtacgaacgtcttaccagctggcgcgcatgcgatcgcggaccagctgcgagctgcggcggttttccgcgcccagacggcacttcagtgaggtatcggtacgcgcgtcagcgatggcgtcgcgcagcgtgttgctgaccaacgacagatcgtggtcgtctggggcatccggattattaatatccagcagggcggagagcaggccgagcgtcgcatagttgctgacgtcgtaggccattggcggaatggtagccgccagtttctccagcgcctctacggtacgcagggtaatgcgcgccgccgacgctttacccatcgcgtggaccagcacgccgctatcgttaaaggcgatcaggcggttggcctggtagccgtgggccagaaacgccccggacatcgctttgccgacgatcaggccaattaccgggtggccggccaaacgggctttggcataagcgccagccgccccggccagcgcctggtgaatgccgaaagcttcttcgcggcggccataggcctggcttggcacatcgatcacggcgacgatcggccgtttgactggctggtcggcgtcggcggcaatggtttcattaaccactttcgccagcgtccagccttccagcaggccgacttcgccgccggcggcgcgcgggtagtggttgttagcatccgggaccacggcgataaaacgcacgttttcgccattaatctggccgtctgccacctggacggaagggcacaggccgctcatcagcggcgcgtcgggcgccagtttgttcagccacagcgcggcgcggtttgggaactgactcattatttatcctcccgggcaaaaagctgtttaatctgcgcggtatccgcctgctggcgggtgtcgaactggctcaagcgacgcagataatcgtcatagttgtcgctgcggtgctgtaccggtacgcctttggcgatcgcctcattcattgcggttttaacggcgttaacgccatcgttaaccagcgcgtcgaccagtccgctggcggcgcgaatttcgccgccggtcatgctccagataaacggccggttgcgggagtcgtactcttcaatgccggcttcctgctcgataacctgcgggccgttgagaccgagacgggcttcacgagtgacgataaggtaactgcacagcgcggcggcgatagacataccgccaaagcagccgacggtgccggcgatgatgccgaccactggggtgtagcggcgcaggtcgacaatcgcggcgtgaatatcggcgatggcggccagaccgaggttggcctcctgcagacgtacgccgccggtttcgaggcacagcaccgcctgcgtcgggataccgttgcggttatcttccgccgccagctccagcgcggcggccattttggcgccggacacttcgcccatactgccgccctggaaggtgccctcgatggcaatcaccaccgcaggctggccgttgatcgtgcctttggcgaccaccataccgtcatcggattgcgggacgatgccctgggcgccgagccacggcgacataataccgtcaaacggatccagcagttcgcggtagctgccgtcgtccagcagggcgtgggcgcgttcgcgagcgcgcagttcgataaagctgcgatcgttacgcatgagcggcctcctcaaaaacctgttcaatacgaatacgggcgacgcccggcgtggcgccgaagtcgtggataatcaactgcccggcgggcaggccgttgatcaggttcaacctgtcgaacagcgcctgccagcgcgcctggctgttatccactgaggtggtgatctgtacgttgagcgtggcgctctgtgcggcggtataaagtacttccatatcgcctgaacccacgactcctgccagcgctcggccgctcagggcgcggctggcaggaaatgacaatgtaatctgttccataacatcctctgaatgcgttagccggcaactctgtcgagaaacagggtggcggcaaggagatcggcggcgcctcccggcgaggcgtttagcgccagcatgattgcgtccaggcgggccagggcggcgcgcccggcgaaactggcgcaaccgccagccgccagcacctcacaagcgccttgctgcatggcctgcagcccggccataccggcgcgcgacagcacgcaggtatcgctcagcgaggtcatgatggccatcagcgcatcaagctgcgcctgcggctcactggcgcctcgcgcccggctgtgctgcagttgcggcagcgccaggcgggtgatatgcgggaaaccacactgcgcttcctcgcgggcgcctggcacctgccagcggcggctggcgcgaagccctttactaaagcttttcggcgcgaagccgtcgggcaggcgggcgagggcggcggcggcgtcggcgatcgcctgtgactgaccctctccacccaacatcgccaccgcgctgaccagcaggcctagcgcccagatagcgccgcggtgggtgttaaccccacccgtcgccagcatcatctgcgcttcgccttcgcggccaaggcggccgacggtttcgcgcagggcgatgtccgccgggcgacgccagctttgctcggccagcgcgtgaaaggtcggctgcaggctgcgggcggagcgctccatcagcgccagattcaggtcctgatgcgcgccgttgccgcggctatccaccagacccggtttcgggctcaggcgggcttcgtcaatcagacaggcgctggcggtatgcgccagccagctgacgcggctttctgcgtgcaggggggagagatttttcattaccagctccggaattttgccggtgggttgtacagtccgtcggaccactccaccaggtcggcgacgctgccggcggccagcagggagcgggtggcatcgctgcggcgaatcccgagatcttccgggtagaccactttgccgctctgacgcagcgcggcgacgcgtttggcgtccacaccaaggccgatatcggtgatcccggccaccgcggcgaccatcgcccggcgctcttcaaggctctccgcacggtacaggtaggcgataccctcttcggtcaggacgtgggtgacgtcatcaccataaatcattaccggcgccagcggcatgccggaggttttcgccacctcaactgcatccagcgtctcaacgaaggttggtttcacgccggcctggaaggtttcgaccatctgcaccaccagctttttcccgcgctgcatcgggtccggctcggtgatcatattgagccatgccggggtggcgtggcggcgaccgtgcgggtcgtggcccatgttcggcgcgccgccgaagccggaaagacggccgcgggtgacggtcgaggagttagccagaccatccacctgcagggttgaaccaatgaacatatctaccgcgtactggcccgccagctggcagaaggcgcggttagagcgcatcgagccatccgggccggtaaagaagatatccgggcgggcgcggatgtactcttccatccccagttcgccgccgaagcagtgcacgctctccacccagccgctctcgatggccgggattaaggttggatgcggattcagggtccagtgtttacagattttgcctttcaggccgagctgctcgccataggtcggcaacagcaactcgatggcggcggtattaaagccgataccgtggttaagcgactgcacctgatgttccgcatagatgcccttgatcgccatcatcgccatcagtatgtgttcttgcttaatcaggcgcggatcgcgggtgaagagcggttcgataaagaacggcttgtcggcaaccaccacgtaatcgatccacgagccgggaatatcgacgcgcggcagatcgcattcgtcgtccaccagttcgttgacctgggctatcacaatgccgtcgtggaaggcggcggcttccaccagcgccggggtatcttcggtactcggtccggtatacaggttgcctttgcggtcagctttatagccggcaatcagcgcgacgtttggcgacagatcgacgtacaggcgcgagtagagttcgatataggtgtggatggcgccgatttcgagcaggccatcttccagcagctgcgagatacgcaggctctgggtgccggagaaagagaaatccagcttgcgggcaatacctttttcaaacaggtccagatgctcgctgcgcccgacgctgggcataatcatatgcaggtcgtggattttttgcggattaacttccgccagcatgcgcgagaggaaatcggcctgtttctggttgttgccttccagcacaacccggtcgccgggggcgagcaggttttccagtacgctgaccaactggtcagtcgggatgaccttacctggcatgttcgcctcggccagccgccgctgtttttccgttcggcgacggttccagacccgccccgtcgtttgttcggcattcattaataacctcctgattcgacaaatcgttttgtttgtcctggtggagattagtgtgcgacgcgaggctatgagcatcaattaagcgcggtggccgatcgttagcatcagagtaacgattccgccgcaacgtttgtgatgcggatcaataatacataaggcgtagtggtctacggagagagtgtagggcagggagcaggccggcgaagcgccggcctgcggaaggactactgtttactgacatcgcttaataagaaagcgatactctgcccgccgctggtctgctcgagggcaattttgacgataatcgtcaacggcaccgagagcagcatgccaaccggacccagcaaccatccccagaagattaaggacaggaataccaccagcgtcgagaggcccagcccgcgccccatgatacgaggttcgagaatattgccgaataccaggttgacgatcaggtagccggccagcactaccagcgcctcgtacagaccaccgaacaccagcacctgcaggatcggcggaatggccgccagcacggaaccgatattgggaatatagttaagcgcgaaggccagtagcccccacataaaggcgaagcgcacatccagcagcaccagcatgccccagaccaccaggccggtgatcaggcttatcgcagttttcagcaccagataatgcgatacgctgtcgatggcccgctggatggcgcccatgccttctactggtctggacattaactgctgcagcttagcgggaagctgcggcacctccagcagcataaacaccaccgtcagcagcagcagaaaaatggaggacatggcgttcgacagctgagtgagcaggctggtgaccagggtcattacggcgttagggtcgatgtacttattgagctcgaccaccgaaacggtgaatcccatacgctgcagccagggcgcgatggtttgcatcggctcatagagatagttgcgatactgcggcagggtgcgtgccagctcgttgagcgaggtccccagcgaggccagcagcacaatggctaacataacaatcaggccaatcagtagcgagatcgccagcacgcgcggtacccggcagcggaccaggagctggaccagaggattgatgatcaccgccagaaaaagcgccaggataaacgggacgattatgtccgccgcaaagcgaatgccggtaaggatgatcaccagcatgcccaacatgatgaccatctttaatccgttaagtgtaataatgggtttagccataggatcccgacctcaaacttccttgcctattaacaggttgcgttacattagcataatgacgcttttttgcagaacaaacgcattgaagaaaaaccgcggcgtaaagaattgcaaagtctttgaattaaatgtagcactatgctacaaatctacctgtgtttaactactgaggacaattttcatccgcaccggacgagaagcaacaccgcggataattgtaattttatggacaatcagttcaggatgtatattttaaatcaccccgcagtatccctcactttttcccgttttgccggcgaacagcactggcattcggcgctatagtcaccttctttctgcctgagctggcgccaagcgcacagcgatatctacgtcagaaattttcctgtttacgtctcgcgtaaacggtaatggattatattctcaagcaggagaagggatcatgttttattggattttattagctttagcaattattgctgaaattaccggcaccttgtctatgaaatgggcaagcgtgagcggcgggcacaccggctttattttaatgctggccatgattgccctgtcatatatttttcttgcctttgcggttaaaaagattgccctcggtgtggcctatgcgttgtgggaagggatcggtattttactgattaccctgttcagcgtgctgctgtttgatgagagtctgtccctgctgaaaatggccggcttgaccaccctggtgatagggatcgtcttaattaagtccggcacccagagaaaagcgtcttcaaagcaggaggtggcccatgcagcagtttgagtggatccacgccgcctggctggcaatcgccattgtgctggaaattattgccaacgtctttttgaagttttccgacggtttccgccgcaagatctacggcatcctgtccctggcggcagtattgggcgcgttcagcgccctgtcgcaggcggttaaagggatcgatctctcggtcgcctatgcgctgtggggcggcttcggtatcgcggcgaccatcgccgccggctgggtgctgtttggtcagcgtctgaataacaaaggctgggcgggggttatcctgctggtagccggcatggtgttaattaaactcgcctgacgtctcgccgcctgcaaagccaggcggcaaacggaaacttccttcacgcctggccccgctgtaattgtgtcaggtgacgctgagggctgcgcaggttcactgctttcggctggcggaaaatcatttccgccaggacgatgtcaataatgatattcttcaccagcctcggtccattactcaccggcaagcgcctccagcttatcgcgaaagccagtcaccgcaatggcgcgattgtccgcccgccagcgatcctgcgggccgggggccgaactctgcacggcgatcacctgccagccgtcctccgttttcagcagcagcggcgagccgctgtcgccaggcagggtgtcgcactgatgcgacagtacgctggtttgcgcccaccctgtcacgatgcaatcctggtggctgtaaagattatcgagatgatcttcaggatagccagactgggtaactttacggtccgccgccttcagcgcggcggtgagatcggccttgctgcccggaaagagcgggatcggcgtaatgccagacggagcatagcgcagcacgatcagaccaaaatcggacggcgccgcagcggaagggacaatccagccgtcgccatcggctttcaggcgtctgcctaagctgggatcgactcgcccgtcaatgccgtggatctcatagacccagttgcccttgcgggaaataaagcgcagggcgaccgctttgtccggcttgccgcgcgggggcgttaacagacagtggcccgcggtcagcgccagatgcggagagatgagcgtcgccgtacacagattgccgctggcggtttccaactggccaatcgcgtcccacggactctcctcggggcggttcaccgctttgcggtcatcgtgaccgaaaaacaacgtcttaatatctttggcgctcagtccgctatcatcggcatgtgcgcccagaggtaacagataaaatgaacacagtaataacagaacgtctctacgcatatcactctctggggaggctatgatgtctattgacagtagcaggagatttaagtttttgaaagtaaacaataattctaaacaggccaaaccgtataccacatcagcgcgcggtggggtctggcgctggtaaaacctcctgatttcaagcggttaataccagtgttctgcttgtgctatttccgcagaaagtggcgtcttgcgcaacaaaattcatgtatcagaacgtactgaattcggttaataatgcagcaattcatccgtgggattattcctggtttgtcagcataatgcccaaaaataatacttttacccaccagatcttcaccggaattcgcacttctttacgcctctcgtaattattttcaatgcgaaacattttctcaccgaaaacgttgttaccgtcgccctgccgttgagtaaatagagaggtagtaccggcgatgatagcctgaactctatttcccctgcgttcggagggcttatgtctaaaaaaggtattcgcgcactggtttatgtttccctggtctcagtcgctatctggggcgcgaccggctatctggtgatggaagccgtgcgtgcattgtgatggacgcaccacccggcaagggccaggcgtgcgagatattacgactaacatgtctggcgtcttctggcgccggacatttttttgcgccgcagagagtcacaggataatgggaagcggggagcgggtcagcgatagccgcacggtattcattttaatgaaaagctggtagaagcagcaaaatgcaggcgcgggataaataattaagagaggaaaaaacgggttgcaaccactgcgcatataattagcaggatcaggatgagctcaaaacgatagcgccgcagcatagtgctctccagaaaaaacggcgctgaaacagcgccgattattaagaaggttggttcaccgggaggaattatgctgccggctgtgcagtcggtttagcggcctggtgtttagtggttttgtggtgttttttcgctgcctgcgctttctgggctgccggtttagccgcagctttgtgatgctttttcgccgcctgagctttctgcggagcagctggtttagctgctacttttttgtgttttttagcggcctgggctttctgagcagcggctggtttagcttctgcttttttgtgttttttggcagcctgagctttctgctctgcggccggttttgccgcggctttgtggtgttttttgtgatgggtggtcttggcagccgtgctgtgggtggcagccggtgcctgagtggtgcttactgcgtcagcagcgaaagcggcggaagagagacccatagcagcggcaacgaccagagctaatacttttttcattctgatatcctcgaaaagttttcttaatttcaaccccactgcggggccggtgaaatcactatatgcttgtcttttcgagctttccgtgagtgtttggtatcggcgtgtaaccgaatgtacaaggcaggaacgacaggacgcgccgggtagcccggcgcgtatgattacaggtagcgagtggtcaggtgctcgcggaagtagcggctattaagatcctcaccggtggcctgctgaatcaactgcgaggtggtgaagcggctgccatgctgccagatattctgccgcagccagtcgaacagggcgctgaaatcgccttcctcaatatcgcgatctaatgtcggcagcgcgcggcgggccgcggccatcagctgcgcggcatacatcgcgcccagggtataggaagggaaatagccgaatccgccgtcggtccagtgaatatcctgcatgcaaccatcccgatagttgccggtggtcgacagccccagccagtgctgcattttctcgtcccacagcgacgggatatcatctacctcaatctcgccgtcgatcagcgcacgttcaatttcataacgcaggatgacatgcgccgggtagctcacctcatcggcatcgacgcgaataaagccgggtttcacctgctgattccaggcgacaaaattatcctggctaaaggccggccgatcgccaaaccgctcgcgcaccgccggtaacaggcggttaagaaaccgctcgctgcgtcccagctgcatttcaaagaacaggctctgcgactcgtggatagcggtggagcgggcgagtcctacgggctggtcgacccacgggcgaggcagattctgctcgtagcgggcgtggccggtttcgtggatcacgccgaacagagcgctgagcaggtcgttttcgttgtagcgggtggtgatgcgcacatcctggggtacgccgccgcagaacgggtgggcgctgatgtcgaggcgcccgccgtcgaagtcaaagccaaggatacgcatcgcctgcaggcccagctcccgttgttcagcaatggggaaaggcccctgcggggcgattagcgcctgcttcgcctgcttctccaccgcctggctaagcagggaaggtagccacgatttgagatcggcgaacaggctgtccagccgcgcgctggtcatatccggttcgaaaatatccagcagcgcgtcgtagcgtgagccgcccctggcatcggcgcggatctgcgcttcctgacggctcagtctgaccacctcgcgtaggttgtcggcaaagcccgtccagtcattggcgggacgctggctgcgccaggcatgctcgcagcggctgccggccagcgattttgcttccaccaggctctccggcagcagcgccgcctgatcgtactgacgctgcatttcccgcaggttggcctgttcaacatcattaagatcctgctggcgggcctcctgtaaccattgtcccacttttttatcggtcaggatctgatgctgcagcacgccgagctcggccagcgcttcgccgcgggcgacgctcccgcccgggggcatcatcgcgaacatatcccagccggcgatggcggcgagatgcgaaaagcgcgacaggcgctgaaaggtacgggtaagctgctgataaggcgtattttcagtcatagtggcgttcggtccgtgacaggtgaataaagagattatcgctttgcctctacactatcctgatacgcccggcgggtcgagcgttgcgcacaggggaagggaaagacacatggcgggagaataagctcacctctgtgatcggtgtgacagaaaacggtaacatatcggtactaaactgtgatcgattacacaggtctggaggttcgggggtggtttatgaatccgttcacctggctgtttattgcactactgtccgttgatgccgtcagagagctgatgggcttgtcttccataatgggcatgtggtgaaacgtggcccgcaggccacgtcacacgcgactatttcagtcgctgatgtaagcaggtgccggtcaacagcgcggcaaggagcagcagcgcgataaacccaccgacgccgttccagccgtagtgatgccagaataccccgcctaacgtcccggcaagacttgaacccaaataatagctgaacaaatacagcgatgacgcctgaccgcgggcgcggcgggcgcgtgggccaatccagctgctggcgacggaatgcgcggcgaagaagccagcggaaaacagcagcatgccgatgaaaataagccacagggaagaaaagagcgtcagcagcaggccgcagagcatcaccgctgtaaagccaagcatcaccggcccgcggccaaagcgtacggtcatggcccctgccttcggtgaactccaggtcccggtgagataagctaccgacagcaggcctaccaccgcctggcttaacgaccacggcgacatcatcagccggtagccaatatagttaaacagggtgacaaaagcgcccatcagcagaaaaccttcgacgaacagcagcggcaggccacggtcgcgccagtgcagacggaagttaatcagcagcgttttcggtcgcagcgaggtcgggcggaaatggcgcgactcgggcaggatacgccagaacataatcgccgcggccagcgcaaagccgctgatcgccgccagcgccacgcgccagccgaagaaatcggtaaagaccccggtcagcaagcggccgctcatgccgccgatggagttgccgctgatatataaccccatcgaaaaggcgacgaaactggggtggatctcctcgctcagataggtcatgccgaccgccgctacgccgctcagcgacaggccgatgagagcgcgcataatcaggatgccgtgccagctggtcatcatagtcgacaacagtgaacagcaggcggccagcagcagggcggtgaccatcaccggcttgcggcctatagcgtccgacagcgggccggtaaacagcaagcccaccgccaacatcgccgtggaaattgaaagcgaaatactgctgctggccggcgacacgccaaactcgttcgacagcaccggcaggatcggctgcacaccgtagagcagggcaaaggtggccagaccggcggagaacagcgcgagagtgacgcgcataaactgcggggtgccacgtttaataaacggatccggacgggatgcaccagcgacgctgacctcgcccgccggcacggtgtcaacggttgtagtacgactcacagagaattccttgcgtagaagttgctgcttaccaacagagtgttgtgaccattcagctcacatttttagggtatgaaaatgtaaatattctgtctaatatattaataatctcaaataagacgttttaaatatgaatatcgagttgcgtcatttgcgctactttgtcgccgtcgccgaggagctacattttggccgcgccgcggcgcgactgaacatctctcaaccaccgctaagtcagcagattcagatccttgagcagcagaccggcgctcgcctgttttcccgtaccaaccgcagcgtcagcctgacggcggccggaaagcagtttctcgccgatagccgacaaatcctcgcccaggtggatgaggcggctgctcgcgccgcccgtctacaccatggcgaaacgggtgagctgcgcatcggctttacctcctcggccccttttattaaggccgtctccgatacgctatcgatgtttcgccaacgccttccggatgtgcatattctcacccgcgagactaacacccgcgaacagatagtgcccctgagcgagggggctctggatttggggctgctgcgcaatactcaattgccggacaccctggcgtgggagcgggttctgcgcgagccgctgttggcgatggtcccggcgaatcacccgctggcccgccagcactcggtcagcctggcggcgctggcgcgcgagcccttcgtctttttcgacccgcacgtcggcactggcctgtatgacgacatcctcggcttgctgcgccgctacggccacacgccgaagattgcccaggaggtgggggaggcaatgacgattattggtctggtggccgccggcctgggggtatcgatcctcccggcctcctttcagcgcgtccagctcagtgaaatgcgctggctgccgatcgacgaacaggatgcggtatcggagatgtggctggtgtggtctaaacaccatgaggaaggggcactggcaaaacgctttcgtgaggcgctgctctcctggaaaagcgagcataattgaggcgaaaaggggctggaaatgtgcggtaaatcacaaggctaagtaaaaatttgacgttcaccgtcgaagtgcttcaccatagccgaaagtttatttcgaagcgcgaaaataagggagtcaatggtggtagcggatagtcaaccaggccatatcgatcaaataaagcagaccaatgcgggcgccgtgtatcgcctgattgatcagctcggcccggtatcgcgtatcgacctttcccgatttgcgcaactggcgccggccagcatcaccaaaatcgtccgcgaaatgctggaagcgcatctggttcaggagaccgagatccaggagcccggcagccgcggccgcccggcggtggggctgatggtggagaccgaggcatggcactatctggcggtgcgcatcagccgcggtgagatccatctttcgctgcgtgatttaagcagtcagctggtggtggaggatcagctggagctggcgctcaccgacagcacgccgtttttgacgcgcgttatcgaccatattgatcgcttctttattcgccatcaaaagaagctggaacgccttacctccatcgccatgacgatgcccggtattatcgataccgaaaatggcattattcatcgcatgccgttttatgaggatgttaaagatgtcccgctcggcgaagcgctggccaatcataccggggtgccagtctatattcagcatgacatcagcgcctggaccatggcggaatctttgtttggcgcctcgcgcggcgcccgggacgtcattcaggtggtcatcgatcataacgtcggcgccggggtgatcaccgatgggcgcctgctgcacgccggcagcagcagcctggtggagattggccatacccaggtcgatccctacggcaaacgctgttactgcggcaaccatggttgcctggagacgattgccagcgtagaaagcgtgctggagctggcgcagatgcgcatggcgcagtcgatgagctcgctgctgcaccagcgtccgctgagcgtggagtggctttgtcaggcggcgctgcagggcgatttgttagcccgggacatcatcagcggcgtgggtaatcacgttgggcgaattctggcgatcatggtcaatctgtttaatccgcagaaaattctgattggatcgccgttcaatctggcggcagaaattctttttccggcaatttccagctgtattcggcaacaatctctcccagcctatagccggcatattaccgttgaaagtactcagttctccaaccgcggaacgatggctggcgctgcgctggtcaaagatgcgctctataacggatccttactcatacgactgttacagggttaacattttttcatagtcacaccaaaaattgcgctatctcaagctgacctcagacggcttcacgtagactttgcccaccgttgattatttctctcccgtatatttcatcgacaaaactgtggggttagtgatgtttaagcgtttctttattacaggtacagacacctctgtcgggaagacagtggtttcccgtgcgctgttgcaggcacttgctgccagaggcaaaagcgtggccgggtataagcctgtggcgaagggcagcaaagagacgccggacggtttacgtaacaaagatgcgctggtgttgcagagcgtctccacgctggcgttaccttatgaggctgtcaaccccatcgccttaagcgaagacgagagcagcgtggcgcatagctgcccgatcaactacggtctgctgtccgatggtttgcagcgtctggccgcgcaggtcgaacacgtggtggttgaaggcaccggcggctggcgcagcctgatgaacgacctgcggccgctctccgagtgggtggttcaggagcagctcccagtgctgatggtggtggggatccaggaggggtgcatcaaccatgcgctactgacagcccaggcgatcgccaatgacggtttaccgctgattggctgggtggccaatcggatcaaccccggtctggcgcactacgccgaaatcatcgatgtcctcagcaaaaagctgccggcgccgctgatcggcgagctgccttatctaccgcgcgccgaacagcgtgagctgagccgctacgtcgacttagacatgctcggcaacgtgatggcgatagatcgaatcccggcgtaacgtccgcgacagcacagacgacacgacgcaggttatcagtagaccgggcagcagcgtatactgcccggtcatctcgcaaatcatcagggttgacatgatcggcgcatgggtcgtggcggccagaaacgccgccatgccggtcagacccatcatgatggccatttcttcacttcccggtagccacagcctgctgaagcaggcaaacagcatgcccatcgccaggccgacaaacagcgtcggggtaaagaccccgccaggcgcgccggagccgctgctggccagcaccgccagcagtttgcagataaatacgcccaccagcagcgcaccggacggcggcagcagcaaatagctttgcactacgctgtagccgttgccccatactgccggggtgatgagcgataagccgccgacaattagcccgcccagcgccagctgccacggcggcgccagcttcagtttaacgaacccgcggtggctgtagtccatcagccagataaacagcggcccgcacagcccggccagcaggccagtcgccagcattaagccatagtgcagggcgctgaggttctgctgtaacacgacgtgatacagcggcgcggcgccgccattaagaaactgcgtcaacagcagggcgatcaccgccgagatcaccaccggcccaagcgaggccagcatcagcgtgccaaagagaatttcagcaataaacaggctgccggccagcggggcatgataggcgctggccatcccggcagccgcgccgcaggcgacccatagcttccattcactctgcggcgtgaagcgacgggcaaacagcgaggccgccagcgcggccagcaggatcatggcgccttcccggccaatcgcgctgccggtcaccacgaccagcaatgacgccagcgatttcaccaggcttgccggcgtatcgaaacagccgtcgccggtctccagggcttccatataatcggtggcggcatgcggacgcgcgacgctgcgtcgttgccagagccagagtaaggttcccgccgtcaggccgcccagcgcgggggtaaccagccgacgccacgccggcagcgactgtgcggcgttgaccaggctcccgctgtcattactgagcaacagcgtttccagcaccaccatagcgtggcgaaacagcgccaccgccagggcggcgagaaggccaatcagggtggcgatcagcaggcggcgaaacatcacctgcacatcaggatagggatgaagacgatgcattagtcacggcgaggttcggaaaacattggcttattgtgatagggaataaccttagatgcaaaagcgataagtgcgggtgaaaggctgggaagcggcaaaataaaaccgcgccggatatcggcgcggcgaagggttaacgatagagcggtttttgcgccacggcgatcggcagattctcctgccactgcgccagagtcgcctgcgccagctgacccagcgcctgatagaaggggtgggcggcatggtcgacaaagacgctcaggaaacgcccggaccacggcagcaggtgccaggccagcagctgagcgaacaacgcatcctgctccgtttcgcacaaccatgccgccaggagtagcacggtgccgaagtgatcttccggttcattgccatcggcctccagcgcgataccgttctcgcgcatccactggcgcagagccagcgtggaatcgccaaacagcacccgtcccttatacaactccgacgctgccgccgagcgcgctagtgcaggtcgcggggggcgccgcgccccgcagacaaagaccacccgagccccccc

SEQ ID NO: 196 - DNA, 17819 bp, Unknown
  source: /note="Description of Unknown: MKP2_2161_1 Mutant Bacteria sequence"
ggctcatctcttcgctcttctgcgagcacaaaaaagcccctgccgacagacaggggccgcaattcggtcgcgaaccgcgatgttgccgccccacccgcccgggcccgcccgccccccgcgcctgcgctcgtggggtggtcggcgtggtctgtcgtttataggagacgggcacggcggttctacgctggcgatgctgccggtgctgatgtggcgttcggtgaaaaaaccgatcgtctggggcccgctgcttggggtggtgctttccgcgatcggcattaaaatgccggacctgctgctggcgtcgatcaaaccgctgggcctggccgccaccgccgccgcgctgttcctcaccggggtgatcctgtcggcgcgtaaactgcagctcaatgcgctgatcgctacatcaaccatcgtgaaactgctggtgcagccgtttattgcctggggtctggtgatgttacttgggctgcacggttccattgccattaccgcgatcctgatgattgccctggccgccggcttctttggcgtggtcttcggcaaccgcttcggcgtccagtctccggatgctgaagccgtgctgctgttgagctcggttctgtgtatcctgtcgctaccgctgtttatctctttgacttcaggactgtaaaccatgtcagcaacgccgcgtccccatgatctagtttggttaaaccgcgccagcgccctggaagacattgccgagccgtgggtggctcagcagtggcgagccgcgctgccggtggtggtgaggcgcgacgttgacgaccaggcccgcgtcccggttggggtgcggggcatgaagcgcgagcagcgcgccgccggctgggtacaggcgcgcaatatcgtgcgcagcgtcaccccggagatgcttgttgatcgtgaggtcttactccattcgccttttgtctctcagccgccggtccagggggctatcgccctcaccttacaccgctggccctggagctggggcgtcaccggcagtaccggctacgcgctggcaaccgagatcctggtgctgcatgcggccagcgatctggatctgctgatccgcgcgccacagccgcttgaccgcgaggcgctgctggaatggcagacccgggtggcccaactcccatgccgcgctgatacccaggtcgaaacgccgtacggcgccttcgcccttaatgaatggctgcgcgacgggcgcgcgctgctgaaaacgtcccgcggcgcgcgcttaaccgcgacgccgtggcacagggaggaataatgaagattttatttacctttcccggtcagggcggccagcgtcccggcatgctggcgatgatccccgatcgcgaggcaaacctcacccaggcgcgcgccgtgctgggggatgaagtcgataccctcgatagcgccgatgcgctacaacacacccgtgcggtccagctctgtctgctgatcgccggtgtcgcctgggcgcgcgagctacagcgtcaggccgtggatccgcagatggtcagcggcctctctatcggcgcgtttccggccgcggtgattgccggcgcgctcgatttcgccagcgcgttgcggctggtggccctgcgcggggacttaatggaacaggcgtatcctgaaggttacggactgacggcgattatgggcctgacccgcccgcgggttgaggcgctgatgcagggccacgaggtttatctcgccaacctgaacgccgaaacgcagttcgtgattgcgggccgtgatgaggcaatggccgaggtggcgcagctggcgctgcgggctggcgccagtaaagccgagcggctggcggtcagcgtcccgtcgcactgcgcgctgctggataaacccgccgctgagctggcgaaagcttttgccggcgccagcttaaggcgcccacggtgcgcctatttaagcggctcgacggcgcgcgtgctgtgggatccgcagcggatcgccgacgatctggcgatgaacatggcgcgcccggtccactggcaggaggcgatggtcgccgccgatgagcgcgatgcgcgcttagccattgagatgccccccgggggggtgctcacctgcctgacccgccaggcgggctggcgcggggagaccattgcgctggagcgcagcggcctggacgtcgcccgccatctggcgcagcggcttagcgattaatactgcgggcgtacatccgtccttccgctgccagcgccagcaggtcggcatcgcgttcgcgatggtgcgaatagacgatagagatcagctggcgcatctggtagggttccgccagctttagcagctgtacatccttctcatacactttcttcatccgccccggcagcagggcaaaaccgacgccagcctgcaccaggctaatcatcgagaaaataacattcacccgggtgacgatctccggctcgaagccggcgatgtggaatgcttcccggaatccggcataggtggcgaacccctccgccagcgaaacaaacttgcggtcggcgtaatcgcgcagatcggcgagccgtgaggcatccagccgttcggtcgccggggcggcgagaaaaatatcgtcctcaaacagcggcaccacgtcgaaagcggtattattgaactccccttcgttggtggcgatcaggatggcatcgagggcatcgtcttccagcatatccagcagcatctgatttgaacccatcgtcaggtccagctccagctccgggcgacgcagcttcatccccataatgatgcgcggaacggtttccagggtcagagaatagagggtaccgatgcgcaaccgcccctgaccgacgcctgcaaccttgcgcgtcgcctcgagcccgcggttcatcagacttatcacatcctggcagtattcaagcagcgtccacgccgcctgcagcggcagcaggttgcgccctttatggacaaacagcgggcagcccaccccctcttccagggtatgcagcgcgcggtgaacgctgacgctgctgagtttcatcgcttcggcggttctggcgatattacctttcgccataaacatcataaagaccgacagcttgcggaaggtgatctccttgttaatatcctcttgcatggcccttccacactcctggtttaattttcttatttcaattcaaaccagtatatcttttatgacgccaaagttgcaggcagcgcgcggcctcagccggtaaataacgcaaaaaagggaagaccatggtcttcccttttgttcactgtcgagtttgcttttacagcgccatatcgtgctgcggcgaggcctcgcgcggcgtctctgccggcttggcggtcgcggtaggcgcagccgctggcatctggatcaccggcggtttcgtcagctgcagggtcgcagcggtgtcatcccaaacctgctgggtcagcgccacgttaccgttcagcttctggccgtagctcggcacaatagcgtgaatgcggctctgccactccggcgagttaaactgctgcgggaacatctgcttgagcacgttcagggtgatcggcgcggcggtggaagcccccggcgacgcgccgagcagcgcggaaatggttttctgctgatcgaccaccacttcggtaccgagcttcagcacgccgcccttctctgcgtctttcttgatgatctgtacgcgctggccggcctggatcagtttccagtcttctttacgcgcgtccgggtagtactctttcagcgcagcgaaacggtcatcatcgctgagcatcacctggctaaccaggtatttcaccagatcgaagttgtcgagaccgacgggggtcatcggcagcacgttattggtggtggtagtgctgagcagatcgaagaacgaaccatttttcaggaacttggtcgagaaggtggcgaatggcccgaacagcaccacgcgcttaccgtcgaggtaacgtgcatcaaggtgcggcaccgacatcggcggcgcgccgactgaagcctggccatacactttctccaggtgctgcgcagtgaccgccgggttctcggtcatcaggaacgagccgcccaccgggaagccggcatagttgtccgcttccggaataccggttttttgcagcagcttcaacgcgccgccgccggcgccgataaagacgtatttggcgtcaatagtctgcgcttccccgctctgcacattcttaatcgttacgtgccaggaattgtcggcattacgtttgaaatccgttacctcagaggaggtctgcagggtgaagtggttatttttcttcaggctgccgatcagctggcgagtgatttcgccgtagttgacatcggtacccaccggcgtccaggtggctgccactttctgctgcggatcgcggccttccatcaccagcggcgcccactgtttaatttgcgcgtgatcggtggagaatttcatcccctggaataaagtggtctgctgcagcgcgttataacgcttctgcagataatccacattatcaccccagacgaagctcatatgcggcgtggaattaataaacgagtgcggatcgtgcaaaataccgcgtttcacctgtgccgaccagaactgacgggaaatcataaactgctcgttaatatcgagcgctttgctgacgtcaatcgacccgtccgcccgctccggcgtatagttcagctccatattcgccgagtggccagtaccggcattattccagccgttggaagactccagcgccacgccgtccagtttctccaccatggtcagatcccagtccggctgcagcgcctgcagccaggtgccgagcgaggcgctcatgatcccgccgccaatcagcaggaagtcggtttttttcgaggtatccgcttcagcatgcgtcgccgcgctgacgaacatcgctaatgcggttaaggaaataatcgtttttttcattgcaggcataatagaattatcacgtagcacacggtcataagaggcagcatattaacgcacttttactttattttaaaatatcatttacactctcgcattttaaaccaaacagttatttaacttaaaaaatcaattttaaaaatagagcgaagacggataaaaaataaggtcgaaaattcaatatctattgccgggtaaaataaaagataagaatttctttaattacaaaagtccaggcgcgcatgctcatcgcgcgcctggcagagaagggattactgggcgggagtgacagcgctacgctgggcttcacgcagggcgagacgcagatgatcgtgatgtttggttagcagctcccgcgcgtgccaggcgtcaagcccgctgagcagcatcaggatcgcggtgcggcagtgctgatgacagctggccagggcggcctttgcttcactgcgcgtgcaatcggtggccgccatcacaatcgctatctgccgctccgcccagtgcgaattgtcagcctgcacgtccacccgcaaattgctgtacacccgaccgtcacggatggcgagtccggttgtcagcatattgacgatctgcctctgggccaactgagccttcggattggctaaccccgccaccgcctccggcccggtctgcggagcaataatgatatccgccagctgcgccgcctcgctggtcggctgctgggtgatgaccgctatcggggcgcccagcgaccaggcgtggcgcatcgccccccacacccatggcgtcttgccgctgacggtcagcgccagcagcatatcgcggttgctgaagtccagcgactgcagctcaaaggcgcccaggtcataattattcgctgcagtctcccgctcggccatcgccgtcgtctgcccaccggcaatcagccccaccagcgcgtgtttaccttccggcgaatagtcgctgaccgcctcaatggccgtccggcccgaagcgccggcgccaataatgaccaggcgccctccccggcttatcgtcgcggtggcgatatcaatcagccgggcgatatccggcagacaggcgccgaccgcctccgaaatctgcttatcatcctgatgcagcatcgccagcatatcggcggtggcgaggcgatcgatgtgggtggtctccgggtgacgacgagcctgcattgacgcggttagcgaactgctcataacaacctccatttacgacagaaaaagcgcatctcggcaaaatcagcggcctgatgcatatccttatattcatcaggactatttaacctctgccgccactataagtggaatgttctgcgctttaccgccgtcggggtcacagtttaccgtccccaacgcgcgtttacgggtgattgacggttatctgagcaattctgtctgaggtctcatcttcaccacccgcctgcatagccagccagaaggattgctggcaaaggttataaaactgtttgcgcatcgggttgacctcctggccggcggcgtcgataacctgccagtcaatccagcactccgggcaggatgcgctatcctgctgcgcgatctcgagctcatagcggcgctggatcaccaccccgctgcgatgccgccagcgggcgatctcccactctgcttccgcttcattatcctgttcacgatgctgggccagtcgttcaacgtgccgctgccggaggatatcccggaccagagaagccagttccatagtgtctcccttaagcctgtggcgaaaagccgcagtgtaccgcgcgctggaggagtctgccgtagcaaaagcggccttttgctttgattacacggctttatgtatgccgcgctatcggcgataataatctttcactgaatctacccggggtcgtcatgaaggcttcagagcacccgcctcgcgttcgccaacgcgccttaccgttaaagctgagcaccgccgtgtccttgatgatcggcagcgtcatcggcgccgtgctgctgctggtgtatgccttgtggtatatgcagatcagcaacgccacccgcgacggtctgaaagagaccgcgctggcggtggcgcgcaccatggccgatatgccgcaggtgaagcgcggactggaggcgcccccgcagcagcagatcattcagccgctggcgcaggccattacccgccgcaacgacctgttgtacgctatcgttaccgatatgcagggtattcgctattcgcatccggacagctcaatcatcggcaaaccgttcatcggccacgatattcagccgacgctgcagggaaaagagaatgtcgccatcaaccacggggtgctggccccggcgctacgggtgtttacgccggtgttcaacgaacggcatcagcaaatcggcgtggtggtggtcggcatttcactgagtaaagtggacgaacagatcgccaacagccgttgggacgtgctgctgaccatcctgttcagcgcgctggtctgcgcgctgggcacctggagcctggttcgcggcctgaagcgcgtgctgctggggctggagccgcacgaaatatccacccagtttcagcagcgtcaggccatgcttcacgccctcaaggagggggtggtggcggtcgatgcccatggcgaggtaaatctcatcaaccccgcggcggaagagatcctcttttccggcccggataagactctcgttcacagccccctgctcgacgatctgcagaccgtactgcaaagcggcgagccaatgtacgaccgcgaactggggtgcaatggtctgctgctgatcggcaatacagtgcccattcgcagccagggtgcggttgtcggcgccatctgtaccttccgcgataaaactgaggtcagccaattgctgcagcgactggacggcatgatgagctatgtggatgccctgcgcaccacctcccatgagtttatgaataaattgcacgtgatcctcggtctgctgaatatgaaaagctacggcaaactcgaggaatacgtgctgcagaccgcccaccgctaccaggcggacatcggcgacattcaacatcgcattaaatccccggtggtggccggcttcctgataagtaaaattcagcgcgccacagagtgcggctttaccctgacgctggcggaggagagcctggtgccggattgtccgaacgagaaacaggtcacggtgctggtgacggtgctgggcaaccttattgagaacgcgctggacgccatgagcggccaggcggagggtgagatcggcctgctgctgcactaccaggacggctggctaagcggtgaagtgagcgacgatgggccggggatcccggagaacaacatcgacgctatctttaacaaaggcttctccaccaaaggcgagaatcgcggcgtcgggctgtttcttgccaaccagcagttgcgcgagctcggcggcaccctcgccgtcgaatcggaacccggcgtatttacccaattttttgttcatctcccctgggatagtaaaaggaaacctgcgtgataaatgttttaattgttgacgatgatgccatggtggccgaactgaatcgcctgtacgtggcaagggttcccggctttcgttgcagcgggagcgcttcgacgctcagtcaggcccaggagatgattaacgatccgcagcaggagatcgatctggtgctgctggatgtctacatgcagcaggacagcgggctcgatctcctgccgaccatccgcgagtcggggcgcgccatcgacgttatcatgattacctcggcggcggatgccgccacggtacagaccgcgatgcattacggggtggtcgattacctgatcaaacccttccagtttccgcgctttgaagaggcgctcaccacctggcgggagaagcgtaagctaataaccggccagccctattacgaacaggccgatgtcgaccgcctgctgcacggcggcgcgccggaggccagcgacgcgcgcaagctgcctaaagggttaaccgcgcaaacgctgcgcacactctgccagtggattgacgcccatccggatgtcgaattctctaccgatgagctggcggcggcggtgaatatctcccgcgtttcctgccgcaaatatctgatttggctggcgcagatcaatattctctataccactatccactacggcgctaccgggcggccggtctatcgctaccgcctggtcgccgaacagtacagtttgcttaagcagtacagtcaataacccgatagccgctgtccagcggcgcaaaacgcagccgctgcggcgatgagagaataatgtcgcgatttttggtaacgaaaatcgcgtcgatatcctgccgctgacgcagcgctgcgcagcccttctccacgccgaggccgaacagcagcgtggtccagatgtcgccgtctaaagaatccgcggaaatgaccgtcacgctatcgagttcgttgtccagcggataaccgctgcgcgggtcgagaatatggtgccagcgtttgccatcctgttcgaaatagcgctcgtaggtcccggaggtgactaccgattgcccgttgaccgtcagggaaccgatcagcgcctgcgcgtcggcaaatggttttttcaggccaatggcccattcgccgagggtatgcacattgccgccgaggttgatcagcgccttctccacctgctgctgacggagataatcgcgcacgcggtcagcgatataacctttggcgatcgccccgagatccagctccatccccggctgttggagaaacacgctgcaggttgcctcatcgaggatcacctcctgtgggcgggtcagcgccagtcgggctctgatatcagccgcgtcaggcacgctgtgcccgtgaaaaccaattcgccacagcttcaccagcgggccgatggcgaggttaaaggcgctgtcgcgcaccatgctggcggctttggcgcactggatcagctgaaagaccggtcggctgacggtgaccggatgacgcccggcggcatggttgatatccatcacctgcgactcggcgcggttaacggtaagcaggtcttcgtagcgcttgataagctggaaaacgcgggaggccatcgcctcatcgtgggaacagagtttgagcaggatgggcgagcccatcaacacggcggagtagctatagacgcggttatcggacatcgggctctccttagaaggggcaagccgggcggtgaaagcgccaacccggcaggagcaaggttacaggttatcctctggcacgtttcgccgcctgatggcccgcgagggtaccgaagataatgatatccgccaccgcgttaccgccgatacggttgccgccgtggatcccgcccaccacttcaccggcggcgtaggcgccgcgaatcggctgctgcgccacattcagcacttcgccatcggtattaatggtcacgccgcccatggtgtggtgcaccccgggggcgatgcgaatagcgtggaacgggccttcgttaatcggcgcgcgcagcgcggtggtccggccaaactgttcatcatgctgtttttccaccgccccgttatagcactcgagggtggcgaggaaggtatggtaatccatccccagtttgtccgccagttcccgcggtgagctggcgctggtgacgaagcctttggcgatgtactcgtcggcagctttgtttttcgcccgcacatgctcgtcgaagacgatgtaagcatagtgttccggcagagcgataatcgccgccgagactttatcgcgggtctccatctcgttgaagaagcggttcccctgctggttaacgagaatagcgccgccgccgcgaatcgattcggaaatcagatacgaggtctgctgctcgacggtcgggtgaatctgaatttcgcccatgtccacggtgccggcgccgatgcgttccagcaacgcgataccgctcccggtagcccctttgtggttagtggtgacgaagccttcaaggtcaggacgatacttcacgaccatcgcgctgttagcgctgaagccgccggtggccactacgatgcttttggtctgtacttcaatgacctctttttcgtcgttgatcagacgtacaccgctaacctcatccccgcgcatcaggatctcttccaccgaggtatccagcaggacgtcaataccgcgtttggtgatgttgcgcaccaggccgctaatcagatagccgccgaccgctgacccgtcgcgcgggcggtgggtacggtcaatgctcatcccaccggtggtggtaatgtcgttgagcataatgccccggtccgccagccactcaatggcttgcggcgcgttttcaacgaaacggcgcagcagctgcgggttgtttttgttgtggccgcccttcagggtttcctgatagaacagctctttactgtcttcgatacccttcacgcgctggaagcgggtttccgcggcgttcatcccggcggaagccttgatggtgttcccgccgatggttggcattttttcaacgatcagcacgctggccccttcgtcgtgtgcctgaatggctgccgccagaccggcgccgccgctgccgactaccaccacatcatagcttttcggcgcggcgtcattgccgccctcttccgccgccagcgctttactcgatttcagcatcgctttggcgaccgcttttttcaccgcctcgctctggctggtggccccggaaatggcatcgacgtgcggggtattggcggtgagaatacgttcgcggatctcttcgaagctggtggtgaattccacagtctggaccgggctcgccgccagttcgatatcggcaatatggtcattttcgaggctgacgttgatcaccagctcattggcgtcatcgtggacggtctcaacaaacatccccggtttaaatttggcgtcgcccatgctcatgtcgcggatcatcgcttccaccagcgagaaacgccatagcggttccggaatgtgcagcgcttcacgctgggtgctgtcgataaacagctccagctcttcgccggcggcgatacgtgacgcccagtccggataggcgatgcaggcgcggcccacggcgatcaggtcataaccatgatcgaggccctgctcggcatcagcggcgttcaccaccccgccgacgcccatcaccggcacctgggcgagggtgtcagagcgcatcgcgcagtatttctcgatcagcggcgtcgcatcgctggtatcgacgatagacggacgcagggtggcacccaccgagaagtgcagatagtcgacaccgcgggcggccagcttttccagcagatacatggtgtcgtcaaagcggatccccgggacctccatctcctccggcgagaagcgatagccgatgataaaggcatcgtcagcatactggcgggccattttgtgggtaatatccagcaccgccagtgggaaacgggcgcggttgtcgcggctaccgccccactcgtcatcgcgctggttggagttcggcgaatagaactgctgaatgagataggtgttggcgccgtgaatttcgaccccgtcgaaaccggcgagaatggcgcgacgaacgccgtcgccaaacttggcgatcatcccttccacttcttctccgctcagcgcccgcggcatggcggcgccctcacgcggcgcggcaatagcgctcggcgccaccggctggcgccccccgatcagctgcgggtcgaccatacggccgccgtggtagatctgcagaatcgcttttgaaccctcggctttgatcgcctcagcgattttcgccaggccggcaattttttcatcattatcaatgccgatcgcgcccgggaaggccagaccgtagtcatcaataaagcagcactcgacaataatggtaccgatgcttccggcgcgcgcgcggtagtactccaccagctcgctggtgacagtaccatcgaaataaccggtgcaggtggtcattggcgccatgagcaaacggtttttcagctcggtaccatttggtaaagtaaatggctgcaaaatacgttcgttactggtcataagttacgctccagattttaaaatattaaaagctcagaatgaggtgacggaatcattaatggttttggttttttaattcctgttgtcatgccaataatatagcgcgttttttaattactaaaccaattacgttagttataaaactatttaaccccagcaataacatcgctacctctattgtattattaaaataataaatagcatttacataatacaaatgcgtgataacaattaggatacttttgttaacatagacaatgacaaggaaacaacaaaaaatacaatagaatcataaagataataaaacataaaataatttcagcatttattgttcatttttattttaacatctatcgatattttcgccaaaataacacctcatcatatagggttatactgataataaaaaaatagtgaaatcaccggcttttattgatcttgatcaattgcaacggccattgaaagcgcaatatataaataaccaacaaatttaatttaacgcctcataaaacgcgttaaataagcgccctgtcgatactcagaaacgcaaaataaaaactaaagtaacttttgtaattaaagaaaccactgagcaagacgctggcgtaaacgttattttcaacaacttgcagatactcattatgaaagagaaaaagacaaccataccgcctgccggtgcagtcaagccaacgactgcgaataaaaaacctctcctgatgatggcgctgccgattatcgttgccgtgctgttattgttcgtcccggtccccgaaggcctgccgccgtacgcctggcactacttcgctatctttgtcggggtgatcgtcgggttgatttttgaaccgctgcccggcgccgttatcggtatcaccggcgtggtagttattgccctgtgcagccagtggctgctgttcagcccggatcagatggccgcgccaggcttcaaaatggctggcgcctcctttaagtgggcggtgagcggcttcggcaactccaccgtgtggcttatcttcggcgcgttcatgttcgccgccggctacgataaaacgcagttcggccgccgcctggcgctgattctggtgaaatatcttggccgtcgcagcctgacgctcggctacgccatcaccttcgcggatctgctgctggcgccgtttacgccgtctaataccgcacgcagcggggggactatctacccgattatcgctaacctgccgccgctgtacggttcaaagccaaacgatccgagcgcacgtaaaatcggttcctatctgatgtgggtagcgatcaccgccgcctgtattaccagctcgatgttcctgtcggctctggccccgaacctgctggccctggcgctggtcaaaagcattgttggcatcaatatctcctggggcacctggttcatcgccttcctgccgctgggtatcctgctgattctggccatgccgctgctggcctactggttctacccgccggaagtgaaagtcaataacgaagtgccactgtgggccgcgcgtgaactggaaaaactgggcaaactgtcgcgcaatgaaattctgctgctggtcttcgtctgcttcgcgctgatgatgtggatcttcgccgccgactggatcgaaccggcgctggctgccctgctggttatcgtgctgatgctgtggaccggcgtgctctcctggagcgatatcaccaacaacaaagcggcatggaacacctttgtctggttcgccaccctggtggcactggccgacggcctctcctccaccggctttatcgcctggctgggtaaagagggcggcgcgctgatgagcggcatctccccggggatggcaaccatcgtcctgctgctggcgttctacctgctgcactatctgtttgccagcaccaccgcgcacaccaccgcgctgctgccggccatgctgaccattgcctcgactatcccgggaatgaatatggaagtgtttgtcctgctgatggtcacctcgctgggcgtgatggggatcatcaccccgtacggtactggcccaagcccaatctactacggcagcggctacctgccgaccaaagattactggcgcctcggcaccatctttggcgccatcttcctggccgccctgctgctgattggctatccgtggatgtccatgatgttctgattcataaccgccgggactaccccggcggtttttatctttatggagtaagtgactatgtcgactaaaccgtttgtttatcaggatccgtttccgctggcgcacgacgatacggaatactatctgctcagcaaagagcacgtctccgtcgccgaatttgacggccagcaggtcctgaaagtagagccgcaggcgctgaccctgctcgctcagcaggccttccacgacgccgcctttatgctgcgcgtctcccatcagcaacaggtcgcctcgattttgctcgacccggaagccagcgataacgataaatatgtcgccctgcagttcctgcgcaactcggaaattgccgccaagggcgtgctgccgacctgccaggataccggcaccgcgattatcatggggaaaaaaggccagcgcgtctggaccggcggcggcgatgaagccgccctggcgcagggcgtttacaacacctataccgaagataacctgcgctactcacagaacgcgccgctggatatgtataaagaggttaacaccggcaccaacctgccggcgcagatcgatctctacagcgtcgacggtgaagaatataagttcctgtgcatggcgaaaggcggcggttccgccaacaaaacctatctgtaccaggagaccaaggccctgatcaccccggcgaagctgaaaaactacctcgttgagaagatgcgcactctcggcaccgccgcctgcccgccgtaccacatcgcgtttgtaatcggcggcacctcggcggaagcgacgctgaagaccgtgaaactggcctcgacccgctattacgacggtctgccgaccgaaggtaacgaacacggtcaggcgttccgcgacgtgcagctggagcaggaattgctgcaggaagcgcagaacctcggcctcggcgcgcagttcggcgggaaatacttcgcccacgatatccgggtgatccgactgccgcgccacggcgcctcctgcccgatcggcatgggcgtctcctgctccgccgaccgcaatatcaaagccaaaattaaccgcgacggtatctggatcgagaagctggagagcaatccgggaaaatatattcctgagcatctgcgtcaggccggcgaaggcgaggtggtaagcatcaacctgaatcagccgatgagcgagatcctggcgcagctgtcggcacatccggtctccacccgcctgagccttaacggcaccattatcgtggcccgcgacatcgcccacgccaagctgaaggagcttatcgacaacggcgaggcgctgccgcagtacgtcaaagatcacccgatctactacgcgggcccggcaaaaacgccagccggttacgcttccggctccctcggcccaaccactgccggccgcatggactcttacgttgatctgctgcagtcgcacggcgcgagcatggtgatgctggcgaaaggcaaccgcagccagcaggtgaccgatgcctgccataaacacggcggcttctaccttggaagcatcggcggcccggcggcagtgctcgcccagcagagtatcaagagcctcgagtgcgtggcctatccggaactggggatggaagctatctggaaaatcgaagtggaagattttccggcgtttatcctcgtcgatgataaaggcaacgacttcttccagcagatccagaataagcagtgcgcgggctgtaaacagcacggctaacgctatcctctgacgctgatatcaggccgtcgccgtttgggcgacggcttttttatgtccgcgtttccccagcttgaattcacttcgcaccaggctatgctcaactacaagccctccgttttttgctgaaaaataacaataattcttatctcaggtgcctcaatgaacaggataagcatcgttatcctctgggcgctggcgctgctggtgctccagccggcgctggccgccgaaccgcgacagcagccaaccgcgcgcgagcaggcacgcacggtcacgattttccaccaacctgtcgtcatgttgcaggccacctttggccagaccacgcccgaagagcgcgttttgcgcacccgtagcgccctgcgcgccttcaccgaagatgatattcgccagccgctgcgggtcgtgccggttatccgctatggtcagccaggcagactgtttctgatgaacggcaaaccggtgctgctgctgagccaggcggatctcgacgagggcgatgatttaaccctcgaccaggcagcccagcgggtgctggcgcgtatggaagcccagcgcaccagcctccaggagcagttcaacaaccgctatctgttcatctccgccggtaaagccctggccggggcgctgctgctggcgctgttttactacggcgccttccgcgcctggcggcgggtgcgacgttttttcctgctgcggatcctcgaaaaacgtagcgccataccgcagcactggcggcgctatctcggcaatattgaagttcgactctatgctgtgctggtcatctttctcgggtacagggggcggcggcgactggccgccccctgtgcgctccctgcgccatacgagacataacgcagaagatcaaccgggagcgcaatctgcccggaattaacatagaagttgtagccctgccaaacgttgtggtcctgccaaacatagtgcgaacagggacatttcctgactcgtatacacatctccgagccaccgagaccagagaggaactatgcagccgcacatgtatttacaaaaaaacaaaacacaaacacaaagcacacacacaaaaacacacgcacagaacgagcaa

SEQ ID NO: 197 - DNA, 17598 bp, Unknown
  source: /note="Description of Unknown: MKP2_2161_1 Mutant Bacteria sequence"
attcaggtcattacaggagatttatctcacgcttttgaagatttttttccctacaaagctcatatgtttttccaaatttaaaagcatcagcagcctgacgccgcaggagcgctcgtgggcgcagatcgcctggcggtacgtcgagaacaatacccagccgcaaaccggcctggtcaacggcagcgacaaacagccccgcgcaacgctatggcagatgggcgacacccttatcgccctgctcgccgccagagagctggggttggtaaaggaagcggaattcgacgcccgcctgacgcccctgctcggcaccctcaatcgcctgacgctgaccgacggcggttcgccgggcaggctatactccactcagacggcgacccctgtcgacttcagcggcaaaccggcggccagcggctggtcagcaaaagatatggcccgactgatgctcgccctgcggctcaccgccgaacgcgcgccgcagtatggtgaatacattgataaaattgtcctgcgctggaacttctgtccggttatcgataaagacggggagctgtggtccgcctcactgcagaacggtcagcggacgatccgcgaggagctccggctgggagacagtgaatacgccgccagcgcgtttcgcctgtggggatttccggccggcaaggccctctcccccccggcgcgccatgtgattatttatcagcgccgcctcgccgttgacgaccgcgacccgcgaaccacctggcaacccgtagtgctctctactctgcccgccatgctgcctggactggagttcggctggcagccgcccggcgtgccggagatggcgcaaaaagccatgcgcgagcgggcggaagggatatggctcagccagaaaacgcgctggacgcaggataaggtgcttaccgcccgggccgatttttcgcttacccaggcgccctggcacgtggaagacaccgtctgggggaatggctacgcctggaatacgctcggggacgacgggaagtactacccccggctggcgcaggtgaccaccaaagcggtctttgtcctgtggacgctttgggaaaccgagtataccgatgcgctgatggcggtcactacccatcttaacgacccgcagcgcggctggtttgaaggacgggtcgaggccaccggcgacgtcaacgccaccctcaccctctccaccaacgccatggtgctggaggcgctgttttacaaacacaacgccgggccgttgttcaaaaacggcctcgcggatgacaacagctactttgcccaccgcgcgacggacgaatttaacccgccccgacgctgcctgccgggcgaacgggtcataaggagcgcaccatgaagttttatcgcgatctctttgaagccagcctgaatcgcgtcgtaccagagcacgacaaacagcgcttcttccaggccttctacagcacctttatccatatgtcaccggaaaccgagcagcacttctcccaacgctccggcgaggaaggccagcagatgatctttaagagctttttcgccatgctggcggtcaacggcgacctctttgtacccgattttctggaacggttggcgcgagcgcagagcgaggaaggcctgcgtctaccgccgcggttttttgccctctggcgggaagcgatgctcaaaaccgtccgcgcctgcgatccgctgtgcgatgaggagatcctcaccgcatgggcaatggccatcgcccctgggctcgagtatctgcgccgccaagcggagctccactatcaaactgttggccagtaatcatgcatgccgctaaccgtaacgaccttaacctcctgccctcggcggtgatgatctacgatgagcgcgaacgactgcaggcctggaatgataaggtggcgctgttttatccaacgatcgcgccctggctcgccgtcggcgcctctcttgagagcctggcggagaagtttatcgatgccggatacaacatcgacccaggccggcaacagacgctgcgcgaggcgattatccgcaactgccgccagacgaaccactgcgaggtccgccagtcgggcaaccgccggatttacgttcagcatcagcggctggcggatggcgggattgtcagcctgcataccgacatcaccgagcttgacgaggcccggcgttcgcgtcatcaactgcatgatgactttttattcaccgcggagtcgatccagatcggtatctgggactggcaggtctcccacgacagcctgcaggtgaatgacaccctgctggcgatggtcggccagtcgcgggcgcagtggcgctttccgctgcgctttatgctcaacctggtccacgaggacgatcgcgccactctgcagcaggcgatgatcgcctcgcaaaacgagcacatgccggtttttgaatgtgagcttcgcgtccagcacccgacgcagggctggcgctggatgctgctctcggggcagatcgtcacccttaacatgcagcagcaggcagagcgggtgatcggcaccttgcaggatattacccggcgtaaagccgcagagctgctggccattgaggcggcgaaggaggcccgcgaggcgaacgaagcgaaaagcgccttcctcgccaatatgagccacgaaatccgcaccccgatgaacggcattctcggcatgacgcagctctgcctcgacacgccgctgaccgcggagcagcgagagtacctttcgctggtgatgagctcagcccagtcgctgctgcacattatcaatgacattcttgatttttcacgcattgagtcgggcaagatgcaggtggacgtagagccgctggagatccgcccttttgttcagtcgctgatccgcccgcatatgcctgccgccagcgaaaagggcattgagctgctggtggatatctcccctgcggtgcctgaggtgctgatcgtcgatggcccccggctgcggcaaatcctgaccaacctgctgggtaatgccctgaagttcactcatcagggggaggtcctgctggcgatagcgccggccgaggacgacaaccgctggcgctttcgcattcgcgataccggcatcggcattgccccggagaagcaaaaggcgatcttcgaggccttcagccaggccgatagctccaccacccgtcgctacggcggcaccggactggggttaaccatttcggcccgcctggtcagcctgatgggcggtgagctgacggtggagagccagcctggggcaggcagcgaatttgccttcaccctgccgctggaaggcctgcacgccgccgtctccggtagcgccccgccgggacgcttcaaccaccagcgggtgctggtggttgacgacaacagcaccaacctgcgcctgcttgacgccatgcttcgccagatgggactgatgccaacctgcgtgaacaacgctggcgaggcgctacgccgggccgccgaaggcccgccatggccgctgatcctgctggacgcgcagatgccggatatggacggcgtatccctggcgctggagctctccgctttgcctgaagccaggcaaaaccagattgttatgctcagctccatgagccgccattttgacgccaatatgcttaagcgcatcggcattgcccactatctgcataaaccggtggcacagcgcgaactgcatcaggttatcgccggcattctggtgcccacgccggtggcgacgacaacgcctgcccccgttgcgcaaccggtcagggaccagaccgggctaaatatcctgctcgccgaggacaacctggtaaaccagaaggtcgccagacgactgctggagcagttgggtcatcgctgcgaggtagtgaacaatggtcgggaagcgctggagcgctggcgcgcagcctgctgggatcttctgctgatcgatctgcaaatgccggagatggacggtgaaaccgccatccgcctgctgcgggaagagacccacgcgctgggcaggcaacatcagcccgcgattgccatgaccgcccacgctatgcagggcgatagagaacgctgtctggcgatgggttttgacggctatatcgctaagccggtgagccaggaggcgctacgggaagccatcgcccgcgtcggcgcggcggaagatagcgcgccggaggaagaggaaggcctgccggacgaagcccgcctgctgaaacagtgcgccgacgatcctgagcttgtcgaggagttgctgggactcttcgctgcaggacttaatgctgcggccgccgccctcaaccacgccattgacgccaatgaccgggagacatggcgccgcgccgcccacaaactgcgcggcgaggccgccacccttggttttcaacgccttgccagtgtgctccagcggctggagagccaggcggcctcgccagaccaaagcgtgccgggcgacctgcgcgacgcgctgaccgaggcgatcgcgggctgccacctgtggctgcgccgcagaacgcaggaggttccccatgatcgctagacgtcttctgctgctggtcatttgcctgccgctggcgcacgccggttctgcgccggtgacctggtcactggccggacaatggcgggtgcatgacgccaacgacagcgccttcgccggcgcgcaggcttcggacggcgactggcgcacgctgcgggtaccggcaaactggtacagcgccggatacgatcatcagggcgccctgtggtatcgccatcaatttaccctgcatggcctgacgccggacgccatggctacgctggtgtttgacggcgtcgattactttgccgaggtggcgctcaacggcaagacgctgacccggcacgaaggctattttcagcgcttcccggtggacatcaccggggccgttcgccgccataatcagctcgccgtgcgggtcgacagcccctatgaagacccgcaaaagatctggccgctgcacaagacgctgatgaaagggatcctcaatcagcacgatacccgtccgggcggcgcctggtcggttcaggggcaggatgccaactccggggggatctgggcgccggtgaagctccatctgagccgcggcgtcactatcgacgaggtgatcctgcgcccggactggcaacaggggctggagaagcccatgctgcgtgccgaaatccgctatcgggccgtgacgcccggccccgtcacgctgcgcctgacggccaccccggacaatttttccggcccgccttttcagcaggcctttgcggtcaccctggagaataccgcaggcactctgcgcgtctcgctgcccatgccctcggcaaagctctggtggccggtgggcacaggtaaaccgaacctgtaccgcgtgcgcgccaccctcgtggataagcgggggatcatggataccgccgtcacccgcaccggattacgtaaggtggaagcgctggcggataatcagggctggcgcatcaacgacagacggctgttcattaagggcagcaactatattggctccccatggctaagcaccatgacgcggaaaaagtaccgtcgggatttcaggcttgtcacggcgatgaacgccaacgccatccgtgtacacggccacgtggcgggccgcgcgctgtatgaggtggccgatgagatgggactcatgatttggcaggatgtcccgctgcagtggggttatgatgacagcgccgccttcgccgataacgccgtgcgccagacccgggcgatgatggaccagttcggcaattcaccggcgattattgtctggggcggtcacaacgagccgccgtggaactcgccgtggatggagaaacgcttccccgactggcgtaaaaccttaaaccagaccctgacgcagcgggtgggcgatgcgctggcggaagacacctcccgcatcgtgcatcgcttttccgctgtcgaagagcactactgggcaggctggtatttcggcaccctgcgcgacctgctcgccccggcgaaaaccgggattattaccgagtttggcgcccaggcgctgccccggctctccaccctgaagaccattatcccggcccgtctgctgtggccgaaaaccaccgctgccgacgaccccggctgggtgcgatggaagtaccataattttcagcctttccagacctttaaatttgccggtattccacgaggcaacaatattcaggagatgattgaaaacacccaagcatatcaggcccggctggtggcgctggcggcggagagctatcgccgtcagcgttatcagccggtgaccgccctgttccactttatgtttgttgagacatggccctccatcaactggggggtggtggattatctgcgccagccgaaggccggttactatgccctgcagcgcgcctatcagccgatcctgccgtccatcgagccggtgaccgccagctggcgtcagggaagcccggcgacggtgcgcctgtgggcgattaacgatacctgggcagcctgcgaggattgccgcctgacctggcaggtcaggcaaaatggccagatgctcgctcagggagaaacctcgctgaccctgccgcccgacgctggccaaatggtcagggagttgaccgtcacccccgccggcccgcagcccgtgacgatcgtctaccgcattgacaaccgtcgcggcaaacacgtgggtgctaaccagcataccgagcccgtcgctgcggcgcaggcggggagatgaagatggagccaatcggtgccgcggtcagtcgtggattttcacccccagacatccgcgaacgaactcagggttgaagtgttttaccgcttcgccaacatagcctaaatccagggcgctgatttgcgccatttcgttatctgttaatacgaaatcccagatagcaaaattttcttcaatgcgctcctggcgggtggatttagggatcaccgtgacgccacgctgcacgttccagcgcagaacaacctgcgcaatggttttctggtgcgcatcggcgatcccccgaagcaatgcatcttgatacggattatgtctgccaccgcctaacggcgcccacgcttcaggctgaacgtgataatgcttcatggcttccagcgccgcgggctgcgcgaaataaggatgcagttcaacctggttcaccattggtttaattctgacagtttcgcagaagttagctaacacatgggggtaaaaattggagacgccgatcgctttcagggtaccggcctcataggcctcttccagcgcacgccaggcgctgaaataatcgcccatcgcctgatgtagcaaataaagatcaaagtattccaggcccgatttttttaatgacgcggcaatcccggctttcgccatcccggtgttggccatgtcctggacccacagtttggaggtaataaacagcgcctcgcgggtacacagaccttcggcgatggcttcgcgcacggcctcacccaccgcatcttcattatcgtagacggcagcggtatcgatgaggcgataaccggtgcgaatggcgttcaacaccgcctgcttacactccgctttatcggtcaccttgaaaacgccgaaacccagcatcggcattttgcgagcgttacttaatactgaatattccacggtgaagctcccctcttgttaaaacaccatggtaagacaggaacgcggtcacgattagcctgtcattcctgatttgacttatgcattcaattcattaatcgcagtgcgctgagatgatctgattttgacagagagcagaaaagtcacccctgccgcgcccagcagtaacagaccgctcagtgcaaaagtgctgtgccatcccagactatcaaacaccaggccgcctaccgttgacccgagggctatcgatagctggatcacggcgaccatcagcccgccgcccgtctccgcatcctcgggcagcgtccgcgcaatccatgtccaccagccggtgggcgccgccgtcgccagcaggccccacaggcttaacagtacggcgaccgatcccgtgtggtgtccggccagcagaagcgttccggcaattgcggccattaacaacgggatagccaccagcgtcggataaaatcgggcattcagaacggtcgtaataagcagcgtgccgataaaaccggcgatacccattgtcagcaatatcagggacagaccagaaggactgacctgggtcaccgtctccagaaacggtcgcacataggtaaataaggtaaactgtcccataaagaacagtccgcaggccagcaatcccagggatagcgtagaaagacggaacagacgcagcaccgatccctgccgctgtggtgcgcgcggacttttcatcgacggcaggctaatgcattgccagacgaaggccagcaccgccagcgggacaagacataaaaaggcgccgcgccagccgacggtggcccccaggtagctgcccagcggcgctgccacaacggtggccagcgcgttgccgccgttaaagatggccagtgcgcgggggacctggcgttgcggcaccaaccgaatggccgttgccgccgacatcgaccagaagccgccgatgacgatcccaatgagcgctctgcccagcatataaaccgggaaactggacgccagggcaataatcaccccagaggctgccatcaacgccgtgagccccagcagcagccatttacggtccagcgatccggtaagacgggatatcgtcaggctggtcagtaccgccagcgcgccagaaagcgcaatgccctgaccggctaatccctcggtaatgtgtaaatcacccgcgatgggtgtcaacagactgaccggcataaattctgaggcaatgagcacaaatacgcagagcgtcatcgccaggacgccgctccagtgtgcccgggtgtgacctaatgcagacattatttctctccgacaagacaaagccgcccgcaggcgcgtggcggctttggggatgtctccggcacaggagatctatttcaggttggttttaaaaaattgcgcgaacgtcgcaaagggaattttgcccgcgacgttgtcatagagatcgacgtggtttgcgcctgggacaatcaccagcgctttctctttactgccgatggccttaaaggcatcttcggcaaaatagcgtgaatgggctttttcgccggtcacgataagcgtcggaatagtcacttcactggcgtaactcagcagcggcatattcataaacgacagcggcatcgtcgcattccatgccccggttgaattaaccgaacgcgcatggaaacctcgtcgcatacggtaataatcgaagaactctttcaggaccggattggggttggcgggcaagctttccggcaaaatacgatcggcagcgctgacgttgcctttatcatcaacatatatgtcatgcccaccgggggcggaagtgccgtttgccgcatccttccagcgctgcgcgttcaagtactgcagtaccgctcggcggtcggctgtcgtgtagcggtctttgccatcgcctaccccatgccccatcgcgcggctcatgtcatacatgacgctggtcgccaccgctttgacgcgggtgtccatcgccgcgtcgttcagggccataccgccccagccgcaaatgccgagcaaaccgatacggttgcgatccacctctttttgcaggcccagaaagtccaccgcggcactgaaatcctcggtattgatatccggtgaggctacgttgcgtgggtagccaccgctttcgcccgtataggatgggtcaaacgccagggtgacaaacccctgttcggccagcgtctgggcatacaggccgctggactgctcttttaccgcgccgaagggaccgctcacggcaatagctgccagtttgcgttcaccgcgatccttcggcaggtagagatcgccaactaaggttatcccgtagcggttctggaaggtcaccttacggtgatccactttcaagctctcagcaaacgttttatcccattgttcaatcagtgaaacaggcgcattcgggttagttgtctcagcagagctcatcgttgtgactccagttaatgaggcgcaaagcagcatggcgggtatcgcggctgtcagttttttggtgaaaaccgtcatcaaaattcccctaaataaacgtgatcaatgcaagtcttcagtagacaacgctgctgtgctttgttgtcgtgcgcttagtgtagccagcagtaatggttctgattagaggctgaaaaatgctaaaattaataccatattgttctaaatggcatctgggtgacgaggcgggagaatggcgaaacgggaaaactataatgacctttatctgtttatgcaggtggtacgggaaggcagttttaccgccgcagcgcaacgacttggcctggcgcagtccggggtaagccgtgcggttcgtgaacttgaagaacgcctgggcgttcagcttctggtgcgtaccacccgccggttgtcgctcactcaggcaggtgagcagctctatcacaacgtcgaatccggtttcgacgccttagatatggggctcgccacgctggcccactatcgtcagacgccctccggtacggtacgcatcaatgccagccagcatgccattgataaagtcctgctgccgaagctggcagtatttaaacaacgctatcccgatatcagactggaactgatcagcgaaagccggtttgtcgatattattgcgcagcgatttgatacgggcgtacgtctgggcccggaagtcggaagcggcatgattgcggtacgcatttcgcccgatatggagatggcggtggtgggtaccccggaacattttcgacgctacggctttccacaaacgcccgccgatttagtcgtccacccctgcatcgcttatcagttcggcgacggcagcctttacgcctgggaacttaatgtggatggcaaaaaaatcacccacccacctcagggacagtgggctttcgccgatagctatatggaggccaaagcggcgaggctcggtctggggctggcctatgtcccggaagagctgattaccgacgatctagcccagggcacacttatccgggtgctccagcgttatagccagcgtctggaaggttcatttctctattacccgcaccgcaatgtgtcgcccgcgctgagagcggtcattgatacattgcgaatgtagctgaggttgcctgcaggcagcaggcaaccggtagtggccggtgacagcttctgtactcggacctgtcatttaattccgatcgatgcaaacagtaatgccagacggaaatgaatttatataaatattaattttgtgagttatgtacttcattataaagtttagaagcagcacctctgcgtaacaagctaaaaaagcaaataatcgtaaagatgaaggggtaaatagccaaaacccatgccagtttttgatttttaataatattatttatagtatcactcaacgaaccacttgaaaagttctcacaaatcctgtcaaccgagcgcacacttatccccgctttttctgagaaaaccgttttatcgaaatcttcactttcacactgttttttatcgagcttccactcagtccagttcaggggaaggtaattattggtccagatcgaactctcagcaatatgatcattaatccaaacccatgacttgtcgtcgcctaatcgtactagtgcggatggcttcaatgccagcaacataaaatttgataatagcagcatagttaacacacaagagacaaatacaccaacattagcgataaataatggttttattgccttaagcgttgatatttcaaaccatcctttcgcggctgtgacatgacgaatatctatatttttctttttcgtccagttaatcagtgatttaatctcttctttattctttgcgccaacattaaataaaacattaaagcgttcaacatcatttctctcattgaaatatgcatttattttaccgtcgtgaaacgttttccctcccaggcagaactcccatagccggttcaataaagaatatgcggatcctgcccgtttccagataaacactcctaataaaccaaaagtaacaaaaattaacgcgctatttatcagcccatcaaaattccatatcgaagaaattaaactttccatctagcccctcttaatcatcccgctaatcgtatgctcagcaatcacaccacagcatcattacaaaataaatattttttaactgcaacttttcttatccagcgcacaaggtcattgccgatatcttcttatacgcaggccacaactatacgtcacgctcttctgctacttgagccttacattccacctcagtgctgctacgctatctctgagaaaatggcgaaggagatataatgaaagtcctcaatatcctgatccgtcgatgcgtgctgattgcccgctttgaagaaaccgtttcgttttatgaacatctcatttcgcaaaaggcaaggttacgttttgactatcccgaatacgatctcaaactggcgcaggtgggttccgtgcttttaattggcggaaccgagcaaagcctggctccgtttcgcgccaccgaggccactttcctggtaaacgacattaccgcctgggagaaacatctgccttccaccggggcaacgattatcaacccggtgaaggccgtgcccaccggctggaacatgctggttcggcatccggatggcatgattgccgaatacgttgagcatcatgataaaaacccggcggatgagatcttctgatgcttcgcgaccagatggtagaacctggcatcagtcggccatactgccagaaaagtgagactttctacggtggcgcgagaaggagagcaggaaaaactggcgcggcaagacgcgccagctcggggatcagcgatggttgcctgacatcttcaggcaaccacgaccgattagtgcttcacgatatacatggtacggctgtaggccacatcttccgggttggtgatcgggtagcctttcagccacggcttaatcaatcggccgttagtgtactggtagatcggcgcgatcggcgctttgaccataatgatcttttccgccgcgttgtaatcgtcgttacgcgctttggccgaattctctaccgccgcctgggcgaggattttgtcgtacgccggatcgttaaagcgcgagatatttccgctgtgggtggaggtcagcagcgacaggaaggtggacggctcgttgtagtcccccacccacgaggcgcggatcacgtcgaaattgccggtgttacggctgtcgatataggttttccactcctggttctgcagcttcacttccacgccgaggtttttcttccacatcgacgccaccgcgatggcaatcttctggtggttctcagaggtgttatacagcagcgtcagcttcagcggacgattcgggccatagcccgcggcagccagcagggctttcgcctgggcattaagctcagcctgactcatgctctcaaactgtgacggctggggggtgaagcccgccgtcacgtccggcgagaagcgccaggccggtttttccccggtccccagtactttctccgccatcacccggcgatcgatggtcatgctcagcgccaggcgtacccgctcatccgccgtcggccccttttgggtattgaaagcgtaatagtaggtacccagctgcggcggggtatacacctgccccggaatatccttcagcagtttctggtacatatttttcgggaaagactcggtgatatcgatatcccctgcaagatagcgcttggtggcggcggactcctggttaatcggcacaaaggtaacctgctggatcaccgttttggcgttatcccagtagtgcgtgttcggcaccaccaccagcttctcattgaccacacggtctttcagaacataggcgccgttgcccaccaggctgccgggccgcgtccagttcgccccgctgtcgacattcgccttttgcaccggatagaaggcaaagctggcggtcaggttgctgaaccacggcagtggtttatccagctgcacccgcagggtgtgggcgtcgacggcggtgactcccagggtctccggcgcggctttgccgtcaataatgttctgcgcgttagcgatccccgccagcgccgcgaaccaggcgaacggcgaagtggttttcggatccaccagacgctgccagctatagacgaaatcttcggcagtaaccggcgtgccgtcggaccagcgggcgttatcacgcagggtaaaggtccagacgcggttatcgttgctctgccagcgggtcgctacgcctggaaccaggttgcctttcgcatcctgattgactaaaccttcaaacagatcgcggatcacctggatttccggcaggcccaccgctttggcgggatctaacgaggcgggttcatctttgatatggcgcactaacagctgtttttccgccagtaccgtgcccggcggtacgtcagccgcccaggccagagaagatacgctggctaaccacagcgcgccgcatgtcaaagcgacaggatacttcataagatcccctttaaaatgaaaaaaataccgccaacagagcgataattatttgtttcatcacctgaaattgcaaacgacatatgatagaaaattgatgtgccgtcggatttcacgcctcagggaatgggtttgctcccgatacgcttttcgccaacactaaataataacgacacacaggaagccctatgtctatttcacgtcctcgcccgcagcgcggcgactttccgccgggaacccggcagtatggcagctcggaactgggcgcgccgctgctgtggtttcctgcgccgcaggccgacagccgtagcgggctgattattgccggtacccacggtgatgagaattcgtcgattgtgaccctctcctgcgccctgcgcaccctgaaacccgagctgcgccgccaccacgtggtgctgacggtcaatcctgacggctgtcagctcgggctgcgcgccaatgcccgcggcgttgacctcaaccgtaactttccagcagccaactggaagcaaggggaaacggtttaccgctggaatagcgcggcggcggagcgcgacgtggtgctgttgaccggcgagcagccgggttcggaacgggagaccgaggccctgtgtcagttgatccatcagattcatccggcgtgggtggtctcctttcacgatccgctggcctgcatcgaagatccgggccacagcccgctgggtcgctggctggccgacgccttctccctgccgctggtgggcagcgtgggctacgacacgccgggctcctttggcagctggtgcgccgatatcggactcccctgcatcaccgccgagtttccgccggtctccgcagacgaggcaacggagcgttacctgccggcgatgaccgatctgctgcactggcaggcttaaagatgaagcacgccggtgctgaaccgcagcgccggctcaacgtccaccgccagccatgtcgggccgtcgaggtcagcgaagcgcgccagcggcgccagagggagcgcggcggcgatcccgcgcgaggtgcagagcatacagcccagcatccgttcaaatccctgccgttccgcctccccggccagagccagcgcttcggtcaggccgcccgttttatccagtttgatattgaccatctcatagcgcccgcgcagccgcggcaggctctcccgggtgtggcagctctcgtcggcgcaaatcggcagcggatgaacgaagttttccagcgccgagtcgtcgtcggcggggagcggctgctcaagcatcgccacaccgaggtccgccagcagctgacagcgcgccgccagcccctcgctgtgccaggactcattggcgtcaacaatcagcgtagcctccggcgccgcctggcggatagcgattagccgctcactgatcagtcgatcgtcgagcttcaccttcaacagctgggcccctgcctgccacagcgccgcggcgctggccgccatctgatccggcgtgccaatgaccaccgtctgggcggtaatcacccggtcaggcaacgccacgcccaacagctgggccaaggttttgccttcgcgccgggcctgtagatcccatagcgcgcagtcaatggcattgcgcgcggcgcctgccggcagcagccgctgcagctgttcgcgggtaagccccgcctccagttgctcgccgatcgccatcacctgggccatgaccgaggcgatgctctcgccatagcggggatagggtgtgcattcgcctacccctttcacgccgtcctcttccagttccactaccaccactttcgcctcgctgcggctaccgcgggcgatcacaaaaggggtatgaagcggccaggcttcctcatacactcgcacgttacgcattcccttgtcctctctggtaaatgttaaatagggtttgccgtgtagctggcggatgtcatacactactcgcgacgttaactatatgtaaacaggaagataaccatgtcacaaaccgtgcatttccagggcaaccccgtttctgttcagggcaccattccgcaggcaggcgctaaagcgcagccgtttacgctggtcgccaaagatctctctgacgtcgcgctgagccagtacgccggcaaacgtaaagtactgaatattttcccgagcattgataccggcgtgtgtgccgcatcagtgcgtaaattcaaccagctggccgctgaactggacaacaccgtagtgctgtgcatttccgctgacctgccgttcgcccagtcccgcttctgcggcgcggaaggcctgagcaacgtggtcaccctgtccacgctgcgcggcgcgtccttcctcgctgactacggcgtcgccatcgccaccggtccgctggctggcctggctgcccgtgcggtggtcgtaatcgatgaaaacgatcaggtcgtctacagccagctggtgaacgaaatcaccgaagagccggactacgacgccgcgctggccgccctgaaagcctgataacagattgcccgggcgcatcgcgctcgcggacattcgatctgcccagccctcgctctgcgagggctttttattgccgcggcgcatagcgggagatagcccgcgccatcgccgggccggtcagcaaaatggtaaacagccgcagcgtctgtagcgccataataaacgacatgtccgcccgggtgccggcggcgataatcgccaccgtgtccagcccgccggggctggtggccagataggcggtcataaagtccatctgcagaatgtgggtcagggcaagggccatcagggcgcacatcaggatcagtccgatgatggaggcgataatctgcggcagcgtcttgagggccagcagaaaaatggctttattaaactggagccccaccgtccagcccagcaccgcataggccatcgccagcagccactccggcagctccagcatcagccagccgccgccctgggccagggcgccaagcagcatcggcagcagcatggccccggaggggatgcgcagccgcatgcccagccaacaggccaccgccgtcagcagcagcgtgaaagggaaattcagggtcaacgatggaaaccagacaatatcctgagtcatctcctgtgcttcattgcccagggcatagcgcaccaccagcgccgccgcgccgacgacaaac

SEQ ID NO: 198 - DNA, 17124 bp, Unknown
  source: /note="Description of Unknown: MKP2_2161_1 Mutant Bacteria sequence"
gggcgcgctgccggatccccgtccccccccccccccccccccccccgctcccccccgtcccggcgctgcctaccggtcccggctcgtcgatggtctccaccaccaccccgtcagcatccgccagcagtccggcatagccggtggcgttttgcgccacattggcctgcgcctgggccgcgctgaggtcggctctcgccgcctctgctgccgcgttaatctggtcgaattccgcggcagagatggcgccgctcgccaccaggccgcgatagcgggccagatcgttggccgcctttttggctcgcgcccgcgcggcatctacggcccgctgttgggactgcgcctgcaaggctagatcagccggatccaggcgcagcagcagctgaccgcgcttgacgctctgcccggtttccacccgccgttcaagcacttttcccgccaccctgaagccgaggtcgctttgggttcgggccactaccacgccggtaaaggcccgcgagccgacctccgcgcgctcgacggtcgccacccggaccagcggcggccggatgcgggggtcgtcatgatcggcaggttcgccgcagcccgcgagggccagcggcaggaggcagacggcaagatggacggcgttgagcctgagcatgggtcaccttaatgaaaagaccggatggtgaccgcattctcagactagtgactaataaagtcaatagtcactaatcagggggagagacttctcaggatcagggaggcaagcagcaccgccgcggtgggcgcggtgtcgagattgtattgcaactgcaccggattgatgaaaggacacatcaccatatacaccgccagggtcgcttcatccagcggggttttgcgctcgaactcacccgcctggcggccttcgacaaggatttgaccaatcagctgctgcagatgaccggcatactgttccgttgaaggccatttatcgcgcgccgcgacggcggcgatgtcgtacagtttgcgatcctcaaaaaacagttcactgccggcctcggtcagcgcccggaacaggcggcgcagtttctcgctggcggacggcgcatcggcgatggcctcgctgacggccaccatgatcttctccagccggctggcgcaaatcgcctcgccaatcgcctgcttggagtcatagaatttatagatataggctttggaaaagcctatcgctttggcgagatcggtgaccgtcgttttctcatagccatagcgactaaagtgcgccatggccgcgtcaagaatctggtcccgaacgctgtggtcatggggaccacggcttgcaggggtgggggtatttttcgtcatccgtttagcttaatgcgatcgttatcgtttgacaacgagtgacgttattatgatttggtcacaataacgccccggtttgcgatccgcttcgccgcgtcacgcctcggtgtttatcgcgccggcgggcagacaacccaggccttgcagcgtctgatacaccgcgctgtcgagcggggtatgcggttccgcgcctaaaaaatcaaccagtttatcgttgcgcaggcgtaccggcagacgccagagatagtgcatctcgaccatttcgcgcagggtggcgttgaagggcgccgccagcttcaccagccaccagggaaaagacttcactaccgccctgccgccatagcgggcgaccacccgctggatcgcctgactcatttcgctgccgtccgggtcccagtggccctgcatatgaaagcgggcgaacggctcaagctcgcgcctgcgggcgagcagcgcggcgatggtggcggcgacgtcgggcagccaggcccactgatgccccacgccgatcgcccccgggtagctaatgatgcggggaagctgaccaggcttgaccagcccctgagaaaaccagttatttccggcgcgtggaccaaaaaaatcgcccgcccgaacaatcaacgcccggccgccgcgctgcacgtaatccttcagcgccagctccatcgccacccggatggcgcctttgcgggtcaccggctgttgtgcggcctcttcagcaatcagtggaaaggaatccggtccatagttgtagaccgtgccgggcaggactacaagcgcccgctgccgttcggcagcctgcagggtgttgcgcagcataggcagtacctgttgccgccagtgccggtagcccggcggattcaccgcatggacgatgacgtcgcaaccggcagccgccgccgcgacctggccgccatccagcgcgtcgccggctatccactgcatgccatctgcgggaccgcaaatctgagcgccgcgcttcagcgcccgaacctgccagttgtctgccaccagccggcgcgccacttccccgccgatgcccccgcttgctcccagaataagtaccttgccgctgctgttcatcctctttccccgttcgctaatggatgcttgacagcctacctgcggctcatatcaaatgaaattgcataccatcgtcgagcggctatacatatttgtatgaatacctctattccctgggagtggtaccgaacctttctcgccgtcctgcaggaaggctctttatcgggcgcatcgcgtaccctgaacatcactcagccgacggcggggcgccatattgccgggctggaaaacgccctcggccaggccttatttacccgctcgcaaaccggcctgctggcgaccgacgcggcgctggcgctgcgggtgcacgccgaggcgatggacaataccgcccgggcgctggaacgcacggcggctaacttcagtcgcgacagagccgagctgcgtggcgtggtgcgggtggccgccagcgaggtggtcggcgccgaggtgctgccgccgctggttgcccggctcaggcaggcgtgcccgaatatcgtcatcgaactgatgctctccaatcggtttcaggatctgcttcaccgggaggcggatattgcggtgcggatggtcgccccgcagcaggagcagcttatcgcccgccgtctcggcaggatcgagcttgggttacatgccaccgccgcctacctgacgcggcagggcctgcccgcgactctcgacgatctggccagccacgcgctaattggttttgatagcgccacccctctcgtgcgccgggcgctgcaggcttacccccgttttcagcgcgaggcgttcgcgatgcggaccgatagcgacctcgcccagttgagcctgatccgcgccggagcggggatcggcatctgccaggtgcctcttgcggatggcattattcccctgcagcgagtgctggcggccgacttttctctgtatcttgatacctggctggtaatgcatgaggatctgcgccacagccctgcctgtaagcgggtatttgattttctcgcccaggggttgcaggcgtatattcgtggcccactggcgagctgacccaccccatcgcgcggtcatttcattgcctgcggaaatagtcactcattgacactgtaaatatggcattgtataaaaccccgccccaataatgagtttcatttgcattactcccatttgctggtcatccactcgcctgtttacaaggatagcgtttaatgaagaaggtcctttgcgcgttaggcttgatgttcaccgccgtcagttccgcgctggcaacaacctaccccctgacgattgaaaactgcggctatcaggagaccttcacccggccgccggagcgcgtggtcgcgctggggcaaaatacggtcgaaattctgctgctgctcgggctgcaaaagcaggtggtcgccagcgccttttggccgaccagcgttttaccgcagctggctgagcaaaacgcgaagattaaaaccttgacggtggaaattccgagcctggaatcggtgctggcgcaaaatcccgatttcgttcccgcccagttgccgctgctgctggggccggaaagcaaagtcgccaggcgtgaagatctcgccaccgtcggcgtgaacagctacgtctcaccggggatgtgcgccaccaaaaaggccaccggcgatatgtacggcagccggcaaaagctgtgggatatgacctggctgtatcaggagattagcgatttttcccgcattttcaacgtcgaagatcgtggtcaggcgctgattgccgatttcaaaaaacgtgaagccgacctgcgccaggagtttggtaaaagcaaaaaggatctctccttcgtcttctggttctccagcgcctcaccttcggccgatgcctatgtcggcggcaaaaacagcgcctccggatttatcgccagcgtgctgggcggacataatgcgattacctccgaaaccgagtggcccacggtgagctgggagagcattattgccgccaacccggatgtgatcgtggtcgccagcctggatcgtaaccgctgggcgctggataaggccgaggagaagatcaaattcctcaaaagcgatcccgccgtcagccagctggaggcggtgaaaaaaggccatatcgtggtcatggacggtcaggcgatgaatccgaccattcgcacgctttacggcgcggaacaggtgggcgagcagctgagaaaaatggggctgaactgatgagcgtcgccgcgattgagacgcgccgcagcatactgctcaccggctggtgtgtactggcagcgatcgtgctggcgctggtgatcgctgttggcgtcagcgttggcgagctggccatcccgctgcagcatgtcttttatgctatcagcaacagaaccggcttaaccgctgagccgctcaaccgtatctatgagagcgttatctgggatttccgcctcagccgcgcgctggtcgccgcctgctgcggcgcaggcctcgctatctgcggcgtcgtgctgcaaagcctgctgaagaatgccctcgcggaaccctacgtcctcggcgtctccgccggggcctccaccggtgcggtgtcgatcgtggtgctgggccttggcgctggcgcaatttccctctcggccggggcctttgccggggccttcgccgccttcgcctttgtcgccttgctgactaacggcgcgcgcggcggcaatgagcgtacgattcttgcgggcgtcgccgcctcgcagttatttaacgccatcacggcctataccatcagcacctccgccagcgcgcagcaggcgcgcgatgtgatgttctggctgctgggcagcttcagcggcgtccgctggcccgaattccagttggtcatcgtggtggtgctcgcgggtctggcggtctgcctgtggtatgcccgggcgctggacgcgttcaccttcggcgacgatgccgccgcctcgctggggattgctgtgccgcgcgtgcgcctgatcctcttcaccactgcggcgctgatcaccgccaccatcgtcagcatggccggctcaatcggctttgttggcctggtggtgccccacgtgatgcgtttcttctttggcccgctgcaccgaacgttgctgatcgccagcgcgctggcaggggcgatattgatggtactggcggacattgcgtcgcgcctgctgattgccccgcaaagtctgcccgttggggtagtaaccgccctggttggggtgcctttctttgccgtgattatctaccgctcaaggaataagtgatgagtatttgcgctgaaaatatcacctggaaggcaggcaaaaaggtcatcgtcaataatgtctcgctgcgggtgccgcgaggcgaaacggtcggactactggggcccaacggctgcggcaaatcctccctgctgcgcgttctggcgggcctgcgccgcccggatgcaggtcgcgtcaccctcgacggccaggatatcgcccggatggcgaaaaagcagctcgcccgccgcgtggctttcgtcgagcaacacggcatgaccgaggccaatatgcgggtgcgcgacgtcgtgcgcctgggacgcattccccaccactctccgttctcaaactggagcgctcaggatgacgaggcgattgccgccgcgctgcagcgggtagcgatgctggagaaaagcgaacagggatggttaagcctctccggcggcgagcggcagcgggtgcatatcgcccgcgcgctggcgcagagtccgagcgaaatcctgctggatgagccgaccaaccatctggatatacaccatcagatgcagttaatgcagttgatcagcgagctgccggtaaccagcattgtggccattcacgatcttaaccatgccgcgatgttctgcgattcgctgatcgtgatgcagcaggggcagatcctcgccagcgggacgccggaggagattttgtccgaagcgctgctgtgggacgttttccgggtgaaaaccaaaatcgagatctccccttaccacggcaaaaagcacattcatttcatcgtttaggttgggcggatatgcctcttttctccctgcgccctgcggcaaccctctggcctccggtgttactgggaagccagttcgtttttaatattggcttttacgcggtcgttcctttcctcgccctcttcctgcgcgacgacatgctgctctcaggcggacttatcggcctgatcctcgggctgcgtaccttctcccaacaggggatgtttatcctcggcgggacgctggccgaccgctatggcgctaaggcgatcattctcgccggctgcgtcgttcgcgtcgccggttttctcctgctggcgtgcggggcgtcgctgtggcccattatcctcggcgcctgcctgaccggcgtcggcggcgccctgttctccccgtcgatagaggccctgctggcgcgggccggcaccctcagccaggccaacgggaaacgcagccgcgccgagtggtttgcgctgtttgcggtatgcggtgaactgggagcggtgatcggcccggtggccggaggcgtgctgagcgggatcggctttcggcatatcgccctcgccggcgcgggaatatttcttctggcgctggcggtgctctttttctgtctgcccgccgacgggcacacgacaacaacgcgcagacgagtcccatggtggacgcctttgcgccagccgcgctttgtcgcgtttattctcgcctacagctcatggctgttgagctacaaccaactgtacctcgccctgccggtggagatccaacgttccggcggccgcgagcaggatctggcgccgctctttatgctggcctcgctgttgattatcaccctccagctccctctcgcccgcttcgcccggcgaatgggcgccgtgcgcatcctgccggtgggctttctgctgctgtcggcttcctttgccagcgtggcgttattcgccgccgccccacccgccgaaggttggctgcggttaatgccggcggctggttttgtcacgctgctcaccctcggccagatgctgttagtgcccgcagccaaggatctgatcccgctgttcgccgaggagtcgacgctgggcgcccactacggagcgctcgccaccgcaggagggtgcgcggtgttagccgggaatttactgctcggtcatttacttgaccaggcgctcattccctcgccgcaggcggtttatccctggcttctgctggcgctgtttccgctgtgcagcgccgtcgccctgcgggcaatctgtcgcccgctggcggcaacatgacgcagagcgggcaacagcccgctctggaagtgaaccgacgataaagtacatcgcctggggaagataacgggcgcgccccgccttactttgccgccagctcgcgacgaataatctcggcgccggcgctcagggcgtgcagtttgccggtcgcgacatggcgcggcagcggcgccataccgcagttggtggacgggtagagtttgtcggcatcgacgaacgccagcgccttgcgcagggttccagccacctcttccggggtttcgatcgcatggctggcgacatcgatcgccccgaccatcacctttttaccgcggatcaactccagcagatccatcggcacgcgcgagttgtggcactcgagagagataatatcaagggacgatttctgcagctgcgggaaagcctcttcatactgtcgccactcggagcccagcgtctttttccagtcggtattggccttgatgccatagccgtaacagatatgcaccgctgtctcacacttcagcccttcggtggctcgttctaaggcggcgatcccccagtcgttgacctcatcgaagaagacgttaaaggccggctcatcgaactgaataatatcaacccccgcagcctctaactctttcgcttcctgattgaggattttggcaaattcccaggccagcttttcccggcttttgtagtggttgtcatacagcgtgtcgatcatggtcatcgggcccggaagcgcccatttgatcggctgactggtgagctgccgcagatagcgagcgtcctccacgaagaccggtttctggcgctccacggcgcccaccaccgttggaacactggcctcatagcggttacgaattttcacgatctcgcgtttggcaaaatccaccccgctgaggtgctcgatgaaggtggtgacaaagtgctgccgcgtttgctcgccgtcgctgacaatatcgatcccggcccgcagctggtcgtcgagggataaccgcaaggcgtcgcgcttgccggccagtaattcttcgctggacagtttccagggcgaccacagggtctctggctgcgccagccaggaaggtttcggtaaactgccggcggtcgatgtcggaagccatgttttcatagtcattagccttttatatgggtttagcaaagcgcgaaattagcagaccattgctcaagcaacgtcttgtgcgggttgataaaatgttgttgtgtaaatttcccctgctcaatcgccaacaggctgcgctcttcccggtcatagacgatttttgttaatgaatgatccaggtggctgagattgggctgatagtattgccccgccggggagttggcattgtagatctccgggcgatatattttctgaaacgtctccatcgtgctgatggtggcgatcagttccaggctggtgtaatcgctgagcagatcgccggtaaaataaaaggccaacggcgcgacgctgttttttggcataaaatagcgtacctgcagacccattttgctgaaatagcgctcggtcagcgagacgccttcctgagcatattcaatgccgaggaccggatgttcgttaccggtgcgatggtaaacatctttactggagacgctcaggcaaatcaccggcgccttgctgaagttggcgcgccaggcgctggattgcacaaaatccttaaagatattgccgtgcagctcgccaaagttttccggtacgctgaagcgactctggtccttattatgttccagaagcagtacgctaaaatcgtaatcccgcacataggaggagaagttattgccgacgataccggcatgacgctccccgctctttttatcgacaatatgcgtttgcaggatctcaatcaccgggaagctggcgctatcctgagcaatattcatctcgacagaaataatatccagttccaccgcatagcgatcgttatggggattatcccagtgggccaggctattaaaacggttattcatcatgattaacgtattgcgcagattttcctcacggttcacccctctggctaaattagcgaagttggtggtaatacgcgtattttccgcagggttataattttcatcaaaccgggtgcgcttaatcgtataggtaaatttattattcatggcgattgtccatcctgatggcgggcataaagcgaacccggcggaatactctccaccagcctggcgacgcggagtcaggccgggcgcgcttcaaccggtaaatgttgttgattcgttaatgaacctatttttgccagagtcagcgctggagggaaagcgacttaaattcaatgcaacatgagccatcctcatgttgctccaggcggtggccgatggccgacgcaggccgacaatattagtcaataaacgtttgttcaatggaagtaggcagggtacactctttaaccactataagatgggcttacctgcccgccgtacccgtttagctggagcttttgtcgtacagaatgattgttgatatcagtattatgtcgatgtgcatggccgtactgctgattatgagcgtactgctgaattaagaggctcccgaacgcaatgacactcgctctcatctgacctccacattcgcgaggaaaaaagaagattcagaggattcgcgccgcctgggattgttccgcctgccggcaccctctactcttttgggacttgcttattgaggaatcccggatgaaaaaagctctgcttgccctgttcgctatcgccaccgttaccgccgccagcgcctttgcggctgataaaaccgacgtcccggcgcctgtcgtcgataacggagtccgcccgccgatggagagggatcgtggccccctgccgccgttcccgccgcagcttccgccgcacagaccggtgctgttttcagccacggtagcaaccgatacgccagcggaaacaattaacaaactgaccgcgctgatccccgccggccaggcgaaacactacgaagtgcacgttgaggtggtgccggttggcgagggaaccgacagacaatagcccaggggatatctacgctgtcatctgtcagcaataaaaaagctgccgcatttcgcggcagcttttatgtacttatttacagctgagcagctgaaaattagctacgcactttccggtaaataaacagtaccaccagcgcaccgataaccgctaccacgaagctgccgaaattaaacccatcgaccttaccaacaccaaacagggtactgatccagccgccgaccacggcgccgatgatccccaaaataacggtcacgataaatccgccgccatcttttcccggcataatccacttggctaaaataccggcaataagtccaaaaatgatccaggaaagaatacccatggttaaccgtcctcttgttacctttaagcatttagtattgaaaagagtagcataaataacgagagtggatcggtaataatataaatattagataattccctgccgacgcccggctgatcttgtgacaacctctctggctctggcaggccggctctcgcttattaccttaaaaaaagggaggctattcgcctcccgccatgcggcttatattaccgcggtggttagtcgtgatgaacaacataaccgcgactgttcgtcgaagatttcaatttgccagacctgatggcgcgtcccgacgtgcagcgctttgcagacgccgcgcacccggcccccgcgcgccgaacggatgtggttggcgttaacctccagccccaccaccttttgttcgccttcgctgcacagatagcctgccaccgaccccagggtctccgccagcaccaccgacgctccgccgtgcagcaggccaaacggctgctgtgtgcggctatcgaccggcatagtggcctccagcgtatcgtcggtaacggtctcaaagcgaatatcgagcagccctaccatgttcccctcaccgagccggttgagctgctccagcgtggcctgacgtttccaaatcatccgattatctccagtaacgcctgcagcgggtggcgaacgccgctgccttcaatacgcttcacctgactgcggcaggagtagcccgtcaccagacagcggtttcgcggcagccgctgcatcgcctgctgccaggagagcgcgtaaatggccaacgagttggcgtggtttttcacttcatgaccataggtgccagccatcccgcaacacccaacgctgacgttttccagcttcgcgccgaagtgggcaaaaatatctgcccactgctttgtcgccgccggtagcgcggtcacttcggtacagtgaccgaacaggtaccagggctcaccgcccagatcgggacgggcgtcgctggttagggccttcggcaaccactcatggactaacagcacctggaaatcgccgcgcttgtcgccgagcgtctgcttgtactcatcgcggtagcagagcaccagcgccggatcgacgcccaccagcggcatgcccagctgcgccacgcggttgaggaagtccgccgccttctgcgcggtgcgcgcgaagcgggtgaggaagcctttgatatgctgcgccttgccgttcggcgagaacggcaggagcaccggctgatagcctaaggcctcgaccagacggataaagtcggccaccacctgggcgtcgtagtagctggtgaagggatcctgcaccaccagcaccatcttcgctttctgctcggcgctcggcgcttcgagctgctcaagggtcatattggcggaacggtggccggccatctgctgcttcagcgacggcgccgagagcagcggcagatcgaccatcccgacatgcttctccgacagctttttcagccaaggctggttaataaaaaagttaaaggtcttcggcgcctgcgccatcagcggcgcataagattcgaccgaggccaccagatgatcgcgcaccggccgcagatagcggctgtggtacagctgcaggaagcgcgagcggaactcgggaacatcgattttgatcgggcactgggtcgaacaggctttacaggccagacagccggacatcgcctctttgacctcatgcgagaagtcatattcgcctttgcgcgcatgccagctgttgcgcgtgcgcgccaccagcgagcgcaggctgacgccctgctccggcagcgccttctccagctggttgggatcgacgccgcggtcggccagcaggcgcagccattcccgcaccagcgtcgcccgccctttcggcgagtggatgcgctggttgctgactttcatcgacggacacatcgggctcttgacgtcaaagttgaagcacagcccgttgccattacactccatcgccccacgccagctgctgcgcaccgcgatggggatctgccgatcccaggtgccgcgcttcgccgcatcgactttcatcatcggcgcgtcgataccttccggaggacagattttccccggattcaggcggttatcgggatcgaagaccgctttgatcttgcgcagctcggcatacagcgtctcgccaaagaaggccgggctgtactccgcgcggaaccctttgccatgttcgccccacagcaggccgccatacttcgccgtcagcgccaccacatcgtcggagatctgcttcatcagcacctcctgctgcggatcgcacatgtccagcgccgggcgcacgtgcagcaccccggcatcaacgtggccaaacatgccgtagctcaggccgtggctgtcgagcagcgcgcggaactcgacgatgtaatccgccagatgttcgggcggtacgcaggtgtcctcggcgaaaggaataggcttggcggcgcctttggcattgcccaacaggccgacggccttcttgcgcatggcatagatgcgctccacgccttcaagatcgtgacagacctgccagccaatgacgcccgcctcgctggcggccatcagctcgtccagccgctggcacagggtagcaacctgctggtcaatcagcgccgcgtcatcgccggcgaattcgacgatattgagcccgagcatctctttatccggtacgtcggtgatcagttcgcttaccgagtgccagacgatatcctcgcgcgccagattgagaactttagaatcgacggtctccaccgacagggctttcgcttcgaccataaagggcgcattgcgcagcgcagagtcgaaggagtcatatttgacgttgaccagacggcgcaccttcggcaggcgggtgatatccagccgcgcttcggtaataaacgccagcgtcccttccgaaccggttaaaatacgggtcaggtcgaactcgctcatctcatcgttaaagacgtgacgcagatcgtatccggtgaggaagcggttgagtttgggaaacttatcaatgatcaggtcacgctgcgccttgcagcgctggtagaccgtgttgtagatccggccaaccgtcgagggggtattgcccagcgtctccgccagcgccaccggcaccgcctgggtatcgaggatatccccgcccatcagcaccgcccgcaggccgagcacgtgatccgacgttttgccgtacaccagcgatccctggccggacgcgtcggtgttaatcatcccccccagcgtggcgcggttgctggtggatagctcaggcgcaaaaaagtaaccatagggtttaagaaactggttcagctgatctttgatgaccccggcttcaacgcgcacccagccctcttcggggttgatttcgataatgcggttcatatagcgggacatatcaacgataatcccgccgttcagcgcctggccattagtgccggtgccgccgccacgcggggtgaaaatcagcgatttaaaacgcggttcggcggcgacgcgcgccagcagcgccacgtccgccgtggatcgaggaaaaatgaccgcatccggcagcagctgatagacgctgttgtcggtggccatcgttagcctgtcggcatagctggtggcggtatcgccggtaaaaccctgttgctccagtacctgcaaaaaattcagcaccagttgaactacccctggcgcctgagaaatttgtgggatcatcacgcttgaccctgcctgactatgttgtgtttgaaaatattgtgttggtgctaactaaacgtttgcgtagcgcattcaactttttatcacatttttttcatatgcgcccacgtgttttctgtgcaaaatcagcccggcaaaattattgatattattatcagtatatggatttacgcggcgccagctgtttggcgcgactggaaaggtaaaatttctctatgattaatccccatcagcctcgggacattccgcaaatactgctgtcggtgctgttcctggccctgattatcatatcctgcctgtgggttgtgcagccgtttattctgtccttcgcctgggccggtacggtggtgatcgccacctggccggtgctgctgcgtctgcagcgtgtgctgttcggcaaacgactgctggcggtgctggcgatgaccctgttgctgtttctgctattcgttattcctatcgctctgctggtcaacagcctggtggataacagcgttccgctgatcaaactcatcagcagcggaaatgtgacgctgccggatttcgcctggctcaacagcgtaccgctggtcggcgataaactgtactccgcctggcacggtctgctggatatgggcggctcggcgattatggccaaggttcgtccctatattggcaccaccaccagctggtttgtcggtcaggcggcgcacatcggcaagctgctggtctactgcggtttgatgctgctgttcagcgcgctgctctactggcgcggcgagcaggtggcctatggtttccgctacttcgccacgcgcctcgcggccaaacgcggcgacgccgcggtgctgctggccggccaggccgtgcgcgccgtggcgctgggcgtggtggtcactgccctcactcaggcggtactgggcgggattggccttgctgtctccggcgtgccctacgccgctctgctgaccgtggtgatgatctttacctgtctggttcagctcggccctttactggttttggtgccgtcgattatctggctttactggagcggggacaccacctggggcaccgtgctgctggtgtggagctgcgtagtcggcaccatggacaacgttattcgtccggtgctcatccgcatgggcgccgacctgccaatgatccttatcctcaccggcgtcattggcggcctgatcgccttcggcatgatcggcctgtttatcggtccggtgctgctcgccgtctcctggcgactgtatgacgcctgggtgcatgaggtgccgccgccgccgaaagaccctgacgtcgtccttgaagagctcagtgagctggaggccggtcgcaagtaatgcctggcaggcggggagacccgcctgtttctttgcccgcatattgttaagcaaaatttattgatcgccggcaatgcgctggccccgcgtgcccttcacctcgctttcctcccccggtccttcacaacaatttaactattgagaggaatctgatcgacggcaaaggccccgctgcctactattagctcacggttataaatcaacaccttgatttataagcatggaaatcccctgagtgaaacaacgaattgctgtgtgtagtctttgcccatctcccacgatgggcttttttttgccctgcgcatcacgacaccagatagcctgacaccggtaaaaaaaatccccggcatcgctgccggggatcggtcctgtcagggcgaacttattttttcagttccgccagacctaaccaggtttgtaccacggtatccgggttcagggacaagctatcaatcccctcttccatcagccaggcggcgaaatcctcatggtcagacggcccctggccgcagatgccgacgtatttaccctgtttcttcgccgcgcggatggccatcgacagcagggctttcaccgcgtcattgcgttcatcaaacagctcagaaaccacaccggaatcgcggtccagaccgagcgccagttgggtcatgtcgttcgaaccgatggagaagccgtcgaagtactcgaggaactgctccgccagcaaggcgttcgacgggatctcgcacatcataatgatcttcagcccgttctcgccgcgcttcagcccctgacgctccagctcttcgaccaccgctttcgcctgggcgacggtacggacgaacgggaccatcacttcaacgttggtcagtcccatgtcgttacgcacgcgcttcatcgcttcgcattcaagggcgaaacagtcgcggaagctttcggaaacgtagcgtccggcgccgcggaagccgagcatcgggttctcttcttccggctcatagcgctcgccgcccaccaggttggcgtactgtctcttctacacatccgacgctgccgccgagcgacccagtgtagatcccggtggtcgccggagcactaaaacaaaaaaaaaaaacagaagaagagaggtgcggagaacgggcgaccgaaacgaaacacaacgaagcagaacagaataa

SEQ ID NO: 199 - DNA, 17089 bp, Unknown
  source: /note="Description of Unknown: MKP2_2161_1 Mutant Bacteria sequence"
ctcgtgctctcttctctgtactcccttcttctttctctctcgcttcgtcctcattctcttgctctcctccttattatctctttatcctccgttcatctcttccttctgttctcatcttcttacatgttttctgttttgttaactatacgtgcgacagaagaaagtaaaagagaggaagaggcggaagtgacagataggtataagagacagaaagggaaccgtgctggcaaaattaattgtcgtcgcgccgaagcgcactggcggccatagcgcccagccgtgagtcgccagctggtgctggagccagggatcctgatagtcggcggcggtggcgaacgcgccgccgaaggtttgctcagtgtagttttttaacaccgggacgtacagctggccccggtactgcaccagcagcgggcggtcgttggccagcagctcggcgcccaggctgcataggaagagaattaaaaacagccacagcgaccagtagccgcgacggttgtggcgaaagcgcgcccagcgggcctgattaacgggactgaagaaagacattagcggccctcaaaatcaatgcgcgggtcgaccagcgtatagctgatatcgctgacgatattcagcagcaggccaatcagagtgaaaatatagagcgtgccaaacatcaccggatagtcgcgggagaccgtcgcttcatagcccagcagacccaggccgtttagcgagaacatcacttcgatcagcaacgagccggtaaagaacatactgataaaggtggccgggaagccggcgatcaccagcagcatggcgttacggaacacgtgtccccagaggatctgtttctcaccaacgcctttggcgcgggcggtgaccacatactgtttgcggatctcgtcgaggaagctgtttttggtcagcatagtcagcgcagcaaagccgccaattaccgtcgccagcaccggcagggtgatgtgccacaggtagtcgaggatcttttgataccaggggagggtgtcgaaatttggcgagaccagaccgcgcagcgggaagaggtcgaaatagctgccgccggcaaaaatcacgatcagcaggatggcgaacagaaaggcagggatcgcatagccaatgataatcagcgtactgctccagatatcaaagcggctgccgttgctgaccgctttgcggatgcccagcggaatggagaccagatagataatcagcgtgctccacagcccgaggctcaccgagaccggcaggctgtctttaatcagctgcagcacggaggcgctgcgaaacaggctgtcgccgaaatcaaagcgcagataatcgcccagcatcttcagatagcgctcgtggagaggtttatcgaagccgtagcggtgggtgatctcggcgatgacttccgggtcgaggccgcgcccgccgcgatagtgaccctcgctgatattgcctgcgccggtgcgggcatggctggcgcccattccgccgtcgccagcccccggcatcccgccgcgctgattaaactcgatggcggcgatggcctgatcgaccgggccgccaggcgcgatctggacaataaaaaagttaatggtgatgatggcccacagggtggggatgactaacagcaaacggcggatcaggtagctgcccatgggatgtccttagcgtctgtccgcggggagggtggccgctttgttcacgtcgtaccaccaggtatcgaggccggacgaatagatggggcgggtcgcggggaaagagaacttattccaccacgcggtgcggtcctgcgccatataccacatcggcaacatgtagttattccaggtcagcacacgatccagcgcccgaccgagagggatcagtttctgcttattgccctgccactgcaggatctgcgcaatcagcttatccactaccgggctttgcacccccggcgcgttgtagctggagtgaatatagtcggacgcccaggagatttgcaggtcggtccccggccagggcatggcgcgccacaggcttggcatcatgtcgtaatcccggctgcggcggcggttgctgtactgcgaattatcaacctgacgaatatccatgacgatccccagacgctgcaggttgtgctgaaacggcagcacccagcggtcattgcccccggccggcagcagtagctcaaagcgcagcggcttgccggtggcggcgttgacccggcgctggttcttcaccgtccagcccgccgcattgagcagggcgtcggctttgagtaagttggcgcgatcgaagccatcgccgcgggagaccggcggctggtaaacctggctgaagagctccggaggcagttcgtttttcatcggcgtcagcagggccagctcggctgcgtcaggcaggctgcgggcggcatattcggtgttctggaaatagctgttggcgcgctgataggcgctgtaaaacagcgccttgttcatccattcgaaatcgaacgccagggtaatggcctgccgcacccggcgatcggcaaaaatcgggcgctgaatattgaacgccagccactgggtatcctgcgccgaggtattggtatgctcatctttaatgatgtagccgcggctgaagttgcgaccgacgtagcgggtagcccagtttttggcgacggtctcttcccggcgatcgacggctcccgctttaaaggcttcgaaagcgacattgtcgtcgagataatagtcatagcgcagcgtatcgaaattccagcgaccgcggttgaccggcaggtcggccgcccagtagtcggcgacgcgggaataggtaatatattgccccattcgccaggcgctgatgcggtatggcccgctggccagcggcggcttcgacagcgggtcgctgagtttgtgctggcgccagaacgcctcgggcatcaccggcaggctcagcagactcagcatgttctcttggccgggctggccgaggtcaatacgcacggtcaacggcgcgatggccttcacggtggtgcctttataaaacaggcgaaactgcggcaccccttcggtcataaacttgttgaaggtaaacgccacatcgcgggcggtgatcggcgtgccgtcatggaagcgggcgcgcgggttgagcgcgatctccatccaggaatagtcctcggcatagcgcgcccgctcggcaatcagcgggtagtagctgccgggctcatcatccgaggtggtgaacagggtatcgtagagcgcctccgtgcgtaccgcggggttgccgcgcagcgcataacggttgaagttatcaaaggtgccgatcgccgccagggtgagggtgccgcctttcggcgccctgggattgacgtaatcaaaatgactgaaaccggcggcgtatttcggttcgccgataatcgcgaaggctacgctttcctgaatggtttgcgccttagcgtccaggctaaacagagccagcagaatcagaaagaggcgcgcatacataggcggcagaataccctgtcatggccggcccccatggccgacatccgttcccgcatcataagtgagacttagcgcgttgtgaaatagttcgcgggttcatcgtgcgcagccaccagcccggccagcgacagcggtcggctgatccagtacccctgcaggaaatgaacgccctggccgcgaagccactccgcctgttcctgggtctccaccccttcggcgacggtcattaatttcagccggcggctgagggtcagtaccgcatccagcaccggcgaggttactgtttcagtaccaatcgcctgcacaaaaccgcgatcgatcttcagataatcgaagttataccgttcgagatagatcagcgcgctatgcccggtgccgaaatcatcaatcgcgatttcgaatccctggcggtggagccaggcgaagttagccatcgatttttctttatcaatcatcgcccgctcggttacctccagcaccacgtgaaagtggtcggctggcagcgcggcggcgaagcgcagcatatcgtcacggaagctgtcggcctgcagatgggcaggggaaatattcagccccagcttcacgccgcgcggcagaatacgcttcaacaccgcagcgtcgctggcgatcagcgcgagcaggtgatgggttagcggcacgatcatctgctgggtttcggccaggttaataaaaacgtcgggcggaatttcaccaaccaccggatggcgccagcgcattaggacctccacgccgctgatacgtagagtctgagcattaaccaccggctgataaacgatgtagaactggttatttttgatccccagcagaatggattttcgcggctccgatttgatcgtcagcacgtaatagcagcgcagccccgccagcaggccgcagacgaccccgagcagcagagcaaactgcgtattttccgccagccagctgttggcatacagatagaccttcagcggtaagccctcgatctgtgcctggcggatcggcgcgttatgcagcgtttgcggatccaccagccgattactgaaggtggagatagcggtgtgatcaatggccagcgcaatgccgctgaaatcgttttgccgcgcggaatagaggatatacggtgtgagattagcgttaatcgacacgaaaatgccgctgttttgatcgccgggtttacctacccacagcgccagcgccgcgctcttcggcatcatcggcgtgcctggtaaaatcgccatagcaccgggtttgctgatatcgatggccgggatcagctggctgaggggcgtattcatggctcccgtagccgatgagcaaaaggcgatgccgtttttgaccagcaggaaagcgcggacgttggggctgaacgcggcgtgggaggtaagcccggagtcaatattctcgcagggctggtccaccagcggctgcaggccgtcaatggtctggcgcaggtcgtgaaaatagcttttcagataggtattaacattgttgataatggcgtcgaaacgctcggcccggttatggtagatcaccataaactgaatgctcccggccaacagcgcgacgatgatccccacgctcaggctggttaaccaggttttacgctggggcgaaaagtagcgagtaagcatagccagattctttccgtgttattgaagcgcatcaacggagtgtcggtcgtcgtttttctcattcccacttaaaagacatagcttattttgcgacgttgagaaccaggtggcaaaaaaaaacactgcctggggcagtgttttttatcccgcagccagccaagggataaccggcggcggtagaggacagtttacgagcggctcaggactcgacgcgcttcattgtagcgctttttccagtacggctcatccatgctggagatagtcaccccgctgctggtggaggcgtgaacaaactggttgttgccgaggtagatcccgacatggcggccggtagagccggcgcgaaacagaaccagatcgcctgtacgcagttgggcacgggaaatcgattttccggtttcctgctgttcagaggttgaacgcggcagttccagaccaaattgttcgcggaaggtgcgctgcacaaacgctgagcagtcgatacccttgcgggtgctgccgccgaggcggtaacgcacgcctttccagctggcatactgatccattaaacgggactttacgtccaggttacggaccatcgtttcaaattcatcctgagaggcttgcagtgatgataaatcgccactacccacagcatgcgtctcagaatgcatattcctggcggtacttgttgaactacacgcggaaagcagaaccgctactgcaatcgcgggggctacccgcaagatatatctcaaaatcggctgagatttgaccatgctgtttattttcccttgttgtccttaacgacaatgtcgttataaaaaatgccaaacgtgttagagcctaaatacccatccgcaatgagacaattccttaagcttaaatttgtgcagtcacgcacaattttattcatgccctgaattaatgctgcggaaaaggcaaaacgagaacgagattaccctatcaaacgccgcatggcgagcggttttgcgcgatttcttataagtattttggtgacaaaaagtgaatcatcgggaaaggccaaaattacggcaatatcgggcaaaaaacagacaattccttcatttgtcacgggattaatgtgacaagaagatgaacgtcatgttgaaaaaagggaaaatgtaaaaagggacccaaaaggtccccttatagttaatgactctggcggctgccggagacattatttggccgatattctgctgggtaagtagcgatcgaaaaaggcgatcaatttatcgctcagcggggtcatcaatacccagggcgcgccgatcagcacggcggtcagggagccgacggcaatatcgctaaaccagtgggcgccaatcattacccgcgggaaagcaaagaccacaaagataatcagcgcgacgcccagcgcgcgacggccaaaatagcgccacataaagctcgcgaagatcagcagcatcatcccatgatcgccagggaagctgtccttcgacgcatccttagtggggaagttaacgacgtcgctgacgcgggtaatatcgctaaaaaacagcgacgggctggcgcgctgtaccggcatcaggtgttgtgcgagctggttgatgatcaccgccgccagcagcatcaccaggcccatgatggcgatctgacgacggcctgcagtcggcgcctttagccaatagctcagcatcaggcagcccatcgccagcagcgaacaggcgtcgaaggcgcgattgttgatgatcgccagcagccaggcataagcatggctgacgctgacgccatggttaaagaaatggaagatcgcggagtcgaccggcaaccacgcgccatggttggctggcagataccaggagcaaaatagcgctacacccgcgatgttaagcagcaggattaaaggaattcggtttttcatcatagccattgcgattttgtgacagtcggcggcaaccttagccgccttaacttaaacgaagcctcaacaacgaggtctggagtgcgttccagtcggcttcattcgcggaaataagctcgatccggctatcgggcggagcgacgctgagggtctcgatatggagatcctccccctgacggttgattcgcaccgccccctcggcaatgcgcatcacgcctttaacgcgccccactggcgccagcctggcccattcgagcaggccgatggtgtcaaagaccgtctccgcgtcgaagatccagccgcagccctgatagccctggccattgttgagatggcggcgccagcgctggtgttccgccaggctgagcgcggcgaggccggaagtggggggatggcggtgggcgtgctccgcgctcgccgccccagcgctgccaccagtcggccagcgcccgggcgctttcggcggtttcccgatcacttttattcgccacaatgatgtccgccgcggccagctgatcgcggaagttgtcgttgctgacggctctttcatccagcagttggcggggatcgaggatgcacagggtggcgcgcagatcgatccagggctcatacaccgccgcggtgaggatatcgaggatctgctttgggtggcccaaaccggtgggttcaatcagcaggcgatcgggtttgccctggcgcagcagggtgttcagcccaacctgcatcggcaggccattgacgcagcacatgcagccgccggggatctctttgagcagggcgccgctgtcggccagcagcgcgccgtctatcccgacttcgccaaactcgttaaccagtacggcccatttttcatccgcaggcttctgcgccagcagatgaagaatcgaggtcgtcttaccgctgccgagaaagccggtgatcaaattggttctggtcactcttttctccaggataaatgtaatgttgtaacagttacgcctatcctgacgaaaaaagggggaaaagagaagtcctgaggcggacagaagagaattctgtccgcataagcgcaaatattgttaagaattcagcgcgcgggcgacggcctcgcgggcgccgtgcgtcgccagctgttgccaggcggcgcggatcccggcgacaaactgggcgttgtgcggcaggtcgcggccaaatatttcctccagccccagcagggcgtcgacgcgctgctgctcatcgctctgggccacccgctgccggatcttgtcgaccagcggatcgcgcacgtcgatcgtctgaccggcgtcgtccgtgccgctgacgtagcgcatccagccggccacgccgagagccagcagcggccaacggctgtcgcgcgccagatgtacgcggatgccatcgagcatgcgctggggcagcttctggctaccgtccatggcgatttgccaggtgcggtgtttgagcgccggattgctgaagcgggcgatgagactgtcggcataggccagcagatcaacgccggtaatggtcagcgtcggagcctgttcgtcaagcatcagctggcgggcggcgcggcggaagacgtcatcccgcatgcagtcgctaatgtgcgcatgccctgccagatagccaagccaggcgaggaaagagtggctgccgttgagcatccgcagcttcatttgctcccagggcaacacgtcatcggtcatctgcacgcccgccgtctcccaggcggggcgcccggcgacaaagtgatcttcgaccacccactgaatgaagggttcgcaactgatggcgcagggatcgtcgacccccagcacggtggcgatttccgccagcgactccggtgtggccgcaggaacaatacgatccaccatggtgcccgggaagctgacgttgtcggcgatccagtccgccagcgccgggctgcgtttttccgccatgccgaggacggcattttttaccacgtgaccgttgtcggggatattatcgcaggagagcacggtaaagggcggaaggcctcgttcccggcggcgggccagcgcttcaactaaaataccgggagctgactgcggcagcgtcggattctccagatcgtgaataatgcgcggatgcgtcggatccagtttcccggtcgccggatcgatgcagtagcctttttccgtaatggtcagcgagacaatcgctacctgcggctcgcaaaatttttcgataatcgccgccagcgaatcgagcctggcgttcagacattcgtgcaccgcgccgatcacaatgggctggttgccgtcggcgcctttttccagcacggtaaacagatggtcctgttcgcgaagctggctcatcagcgtgtcgccgctgaacagactgatttcacagatcccccagtcgccgccgacgttattcagcacgcgatcggtgagcagcgcctggtgcgcgcggtgaaacgcgccaaagccgaaatggacaatacgcgagcggagctggctgcgatcgtattgagggtattgcacgttcttcggtagcgtagcggttgcaattgttgtcattcttcccacacctgtttaactgcttattaacaatgccagtctaaagttatatgacaggaagttaaattggtaagccgaaattatccgctgactgtgagctggatcaatcaataggccagcactgtttgcagccaggtgagaaacatgtatggtagtcgtcatgagtgtcgccattattggtataacaacttttgtgagggcatagcgatggagcaaacctggcggtggtatgggccgaacgatccggtatcgcttgatgatgtacggcaggcgggggcgaccggcgtcgtcactgcgctgcaccatattgcaaacggtcaggtatggccggtcgacgagattaaagcgcgtcaggcgctgttagcggcaaaagggttgacctggtcggtcgtcgaaagcattcccgtccacgaggatattaaaacccacagcgggcagtatgcgacctggattgccaactatcagcagagcatccgcaacctcgcggcctgcggcatcgataccgtgtgctacaactttatgccgatcctcgactggacgcgcaccgatctggaatatgagctgccggacggctcccgggcgctgcgtttcgatcagatcgctttcgccgcctttgagctgcatatccttaaacgcccgggtgcggaagcggattacagtgaagaagagcagcgtcaggctgaggtctatttcaaggcgatgagcgaagcagatatcgataaactgactcgcaatatcatcgccggcctgccgggagcggaagagggctacacccttgaccagttccgcgcgcgtctggcggagtacgaccacattgataaagcgcagctgcgtgaaaatatggcctatttcctgcgcgccatcgtgccggtatgcgaagaggtagggatccgcctggctgtgcatccggacgatccgccgcggccgatccttggcctgccgcgtatcgtgtcgaccatcgaagatatgcagtggctgaaggagacggtggatagcattaataatggcttcaccatgtgtaccggatcgtatggcgttcgcgccgataacgatctggtgaagatggtggagacctttggcgatcgcatccattttacccatctgcgctctacctgccgtgaagcaaacccaaaaaccttccacgaggcggcgcaccttagcggcgacgtcaatatggtggcggtggtggatgctatcctgcgtgaagagcagcggcgtaaacaggccggcgatctgcgcccgatcccatttcgtccggatcatggtcatcagatgctcgacgatctgcgcaagaaaaccaacccaggctattcggcgattggccgtctcaaggggatggcggaagtgcgcggcgtcgagctggcgctgaaaatgaccaaataccctgaactgctgtaatcgcggcaatggggataataaaaaggacagccagcgctgtccttttttactgtcggggcgttaccgatgattaatccgcgcggcccatatagcggcactcttcgatatgaatgcggattttctcaccggtggtcaggtattccggcacctgaatcaccaggccggtgctcatggtggctggcttggtgcgggagctggcggacgcacctttaatacccggcgcggtttcgataatttccaggtcaacggtctgcggcagctccagcgccagcagctggccgtcccaggtcaacacctgcatgtccggcatcccaccttccggaataaactgcagctcttcttcaatctgctctttggtaaaggtgtaaggggtatagtcttctttatccatgaacacgtattcgttgccatcgacgtaggagaagtcgacgaaacggcgggtcagggtgacggtatcgacgatatcgtcgcctttgaagcgctcttctactttcaggccggtgcgcacatcggagaagcgcattttatacagtgtcgcagcaccgcgggcgctgggtgactgaatatcaatatttttcacaatcagcagcttgccgttgtaattcagcaccataccttttttaatttcattcgctcttggcattgcagtaatcctgtcacttaacgagtcaaaaatatcgcgtaaaactactcgcgcccgggcgttcaggcaagcggatttcgcgagttttgctatcttctggcaaaacgtttaggctgtggcgcaaaatgagcgtttgggagtcgggttgtggaatgtcgtactgattgtggcgcatgttgcatcgccccctctatatcatcgccgatccccggcatgccgcagggcaagccagctaacacccgttgtatccagctttccgagcgcaatttatgccttattttcggctcccctctgcgcccgaaggtgtgcgccagcctgcagccctcgccggagatgtgcctcacccaccgcgatgaaccgatcacctggctgctggagcttgagctggccaccgcgccctgagctcaacgcagcagatgagagggatggaaaccaatgtgcttacacgtctcttatccgccacaggcaggcctgagtgacaacgcccatcgccagcgcaatccagaacaccgcgtgatagctccagatctccgctactacccccgccagtgaaccggcgatgatccagccgacgcgggtagtattggtatagagggtggtggccgctcccgcctgccccggcatcaggtcctggaaatagagcatgccgatcccggcgaggatcccgatatagatggcgttcagcacctgcatcgccagcagcagcgctggcgtatgcaccgtcagcatgccgacgtaaaacagcaccccggccactgcagaaagacgcatcagaaagcgtttgccgaaacgccgggcgtagtaaccggcaatcagcatggtcggaatttccagtccggcggcggtgcccatcatcagccccgccagcttctccggcagatgcagctcgttaatgataaacagcggcatgttaatgatgtacaggctgttagtaccccacatcagggtgcagatgctgaacagcagcagcgcatcgcggcgatgcgtgcgcggagcttccagccggccggtcgctaccggctttgctttgcgcatgctgggcaagaatagccagaccatgatcccgcagacgataaacgccgccgcggcgctgagatacatcgcggtaaaaccaaaccccatcgccagggcgtaggccagcgggggaccaatcacccatgccagggagacctgggcacgtaaaatggagctgaacatcaccgcttcgcggccggtcctgtcggcatgctcccgcgcgagggcaaacatctgcgggttggcggtcgatccaaagctgctgagaaaaacgccgatgaacagcaaaatgaaatagttgcggttccaggcaaagaggacgcaggccagcacccccagcagacagcagacgacaatcagctgcttgcgatcgccctgacggtcggagcggccggcgaggaactgactgaccagaatgccaataaccgcgctgccggtaaaaaagaaaccgaccatcgccgggcggacgtgcacttcgttggtcagaaacaggctcagggtcggggtttgcagcgccccggcaatgcccgtcagaaaggcgacgattaagaaggcggaagaggtgacatcgaacccgcgtcgggggagagcggcgctacggttttccatgggtttggttttctgtagtttcaggagacggcgcggagtttacgcctgctggctaaaaataaacagtagtatggcacgaataattaaaaaggcgtttcaaaatatagggttcagcaaaaagctgacgttcgaggcggtcgatagctaatgcttcagcaaaagtgtgcagtacctctaagttctgcgatcaagtagctgacgtaccttgcgcgttgagcaagaaaggtacaaaattcttgaaacgtttcagcgtcattcggcaatccgttccccgtcagatggcgccttttttctcaagttagctgaaacgattcaattcagcaggagaggagaaccatgttccagttatctgtgcaggatattcatcccggccagcaggccggtaataaagaagaggccatccggcaggtcgccgccgcgctggtcagcgccggcaacgtggccgatggctacgtgaacggcatgctggcgcgcgagcagcagacctcgaccttcctcggcaacgggattgcgatcccgcacggcacgacggatacgcgtgaccaggtgctgaagaccggcgttcaggtgtttcagttcccgcagggcgtcacctggggcgaagggcagaccgcctatgtggcgatcgggattgccgccagctcagatgaacacctcggcctgctgcgtcagctgacccacgtgctgagcgatgacgcggtcgccgcgcagctgcagtccgccaccaccgcggaagagctgcgcgcgctgctgatgggagagaagcagagcgaagcgctgaagctggataacgagaccctcagtctcgacgtcgcggccagcgatctgctgaccctgcaggcgctgaacgcggcgcgtctgaaagaagttggcgctgtcgatgccgccttcgttagccacgtcattaacgatacgccgctgaacctcggtcagggcgtctggctgaacgacagtgcggaaggcaatttgcgcagcgccgtggcggtcagccgcgcggctaacgcctttacccgcgacgagcagccggtttccctgctggtcacggtggcgatggccgacgagcagccgaccgcagtgctgaaccgtctgagcaagctgctgctggacaagaaagctgaacatttgctgaaagccgacgccgccaccgtgctggcgctgctgaccagcgacgacgccattgccgaagatgtgctgagcgccgaattcgtggtgcgcaatgaacacggcctgcatgcccgtccgggcaccatgctggtcaacaccattaaacaattttccagcgacatcaccgtcaccaatctcgacggttccggcaagccggctaacggtcgcagcctgatgaaggttgtggcgctgggtgtgaaaaaaggtcaccgtctgcgttttaccgcgcagggtgaggatgcgcaacaagcgctggatgcgattggcgaagcgatcgccgcaggccttggggagggcgcataaatgagcagacgtgtagcaacgattacgttaaacccggcatacgacctggtgggattcaccccggagattgaacgcggcgaagtgaacctggtgcgcaccaccggcctgcacgccgccgggaaaggcattaatgtggcgaaagtgctgaaagatctcggcattgacgtcaccgtcggcggtttcctgggtaaagacaaccaggacggctttcagcagctgttcagcgagctggggatcgccaaccgtttccaggtggtgcagggccggacccgtatcaacgttaagctgacggaaaaagatggcgaagtgaccgatttcaacttctccggctttgaagtcaccccgggcgactgggaacgcttcgtcaacgactccctgagctggctcgggcagttcgatatggtctgcgtcagcggcagcctgccgtccggcgttagcccggaagccttcaccgactggatgacccgtctgcgcagtcagtgcccatgcatcattttcgacagcagccgcgaagcgttggttgccggactaaaagcggcgccgtggctggtgaaaccgaaccgtcgcgaactggaaatctgggctggccgcaagctgccggagatgaaagatgttatcgacgccgcccatgcgctgcgcgagcagggtatcgcccacgtggtgatctccctgggcgaagagggcgcgctgtgggtcaacgcctctggggagtggattgctaaaccaccttcagtggaagtagtcagtaccgttggcgccggcgattcgatggtcggcggcctgatttacggcctgctgatgcgtgaatccagcgagcataccctgcgcctggcgaccgccgtcgctgccctggccgtcagccagagcaatgtaggaattaccgaccgtacccagttggccgcgatgatggcgcgcgtcgacttacaaccctttaattgacagcaggagaggcataatgaaaacgctgctgattattgatgccggactcggacaggcgcgcgcctacatggcgaaaaccctgctgggtgccgcggcgccgaaagcgcaccttgagctgattgataacccgaatgacgccgaactggccatcgtgctgggaaccgcgctgccggccgatagcgcgctgaatggtaaaaacgtttacctgggcgatattaaccgtgctgtcgcccatccggagctgttcctgggagaagcgaaagaccacgctaagccctacgttgcgccagcggcggtagccgttccggccgccgctcaggggcagaaacgcattgtcgcggtcaccgcctgtccgaccggcgtcgcccacacctttatggcggcagaagccatcgaaaccgaagccaaaaaacgcggctggtgggtgaaggtggagacccgcggctccgttggggcgggcaatgccatcaccccggaagaggtggccgaggcggatctggtgctcgtcgctgccgatatcgaggtggacctggcgaaattcgccggcaagccgatgtaccgcaccaccaccggtctggcgctgaagaaaaccgcccaggagctggataaagcggtggcggaagccaaaccgtaccagccatccggcaaacctcaggcggctgctgaagggaaaaaagagtcggcgggcgcctatcgccacctgctgaccggcgtctcctatatgctgccgatggtagtggccgggggcctgtgtatcgcgctctcctttgccttcgggatcaaagcgtttgaagtgaaagacaccctggcggcggcgctgatgcagatcggcggcggctcggccttcgcgctgatggtgccggtactggcaggctttatcgccttctccattgccgaccgtccgggtctgaccccgggccttatcggcggtatgctggcggttagcggcggctccggctttatcggcgggatcatcgctggtttccttgccggttatgtggcgaaagccatcagcacgaagctgaaactgccgcagagtatggaagccctgaagccaatcctgatcattccgctggtctccagtctgatcgtgggtttggcaatgatctatctgatcggtaaaccggtagccggtatcctcgcctggctgacccactggctgcaaaccatgggcaccgccaacgcggttctgctgggcgcgatcctcggcgcgatgatgtgtaccgatatgggcgggccggtaaacaaagcggcctatgcctttggcgttggcctgctgagtacccagacctatgcgccgatggcggcgatcatggcggccggtatggtgccaccgctggcgatgggtatcgcgacgctggtagcgcgcaataagttcgacaaagggcagcgggaagggggcaaagccgagctggctctgggcctgagatgtatcacggaagaggcggggccgcgtgcggcgcctgagccgcgcaggaggcgtcgggcggtcatcatgcgccgcggcggtccgcgcg

SEQ ID NO: 200 - DNA, 14671 bp, Unknown
  source: /note="Description of Unknown: MKP2_2161_1 Mutant Bacteria sequence"
gcgggggggtgcccgcggtgcccgttgccgcccgctggcggctggctcctcctcgtgaccctcccctggcccgctcccgggtgttggcgcgcggggcggtctggcagttccaacccgttgcggcagtccccggcccctcccttggccagggcgcgaaagccttaggctgtaaagtgaaaggagacggcgtcaaccagcatgtgttggcgatcctcgccgccgatcggcaggccgacctcgccagcctggcccggcatatcggcggcagcaaagcctcgctggccagcccggcggaggtggatgccctcaccgcctgcgtgttcggcgccattccccccttcagtttccatccggcgctgcggctggtggcggacccgctgctgtttgaacgctttccacaaatcgcctttaacgccgggcgcctggaccggtcgatcattctcgacaccgaagactatttacatatcgcccgaccagagatcgcgacctttcgccgtcttagctaaccgggcatccgcccagatttccgccgcatggcgtaaaaatcctgtttattcacgccacgatgcgtagagtaagcgggatatttttggcattcttattttggcaaggacctctgtacatgtttgataccaccctgttgatcctgctgggtctggcggcgctcggctttatcagtcataacaccaccgtggcgatctccatcctcgtgctgattatcgtgcgcgtcacgccgctgaacgccttctttccctgggttgagaaacagggactgaccgtcgggatcattattctgaccatcggcgtgatggcgcctatcgccagcggcacgctgccgccctcgacgctgatccactcctttatgaactggaaatcgctgctggcgattgcggtcggggtgtttgtttcgtggctcggcgggcgcggcgtctccctgatgggctcccagccgcatctggtggccgggctgctggtcggtacagtactcggcgtcgccctgtttcgcggcgtcccggtcgggccgctgattgccgccgggatcatctcattgtttattgggaagtcgtagccaggctaccgtgatagcggcccggtgtctgcccgagcccttttttaaacatggtgatgaaggcggtggtggaatcgtagcccagcgcctgagccgtctgctgcaccgtctgcccgcggatcagcagctgcagcgcgaggatcagctgcagctgatggcgccagcggcgaaagctcagccccgtttcgcgcactaccaggcgggccagattccgctcgctcatcgcaaacaccgccgcccactggctcagggtctgccagcgcgccggatcctcagccatcatcgtcaccatttgacgaattttcgggtggtttgataccggcagctgcaggtgctcctgcggctggcggggcagctcatcaaacagaacctgcaccagccgggccgtggcgggggcggccagggactctccgccgcgctccgccagagtagggatcagctctcgcaccagcggggaaatctttagcgtacagcagcgatccggcatcggcgcggcgcccggctcgatgaacaggaagcatacctgggcgccgggggtagcgcggttactgtgggacagctgccccggaacccacaccgcatactgcggcggcaccatccacattgcgttctccacctcgcaggtcaaggctccgtgcagggcaaggatcagctgccccttacggtgggaatgcgccggaatatactgctccgcctccaccacccggatacgaaaggcaatggccgattcgtggccactgtccggttcatagccatccagccccagtccaatcatcatattgtccgatattagcgataatctgtcattttagcttgatttaaacgagggacaaagccgctatcgtaacccccctcgttagttactttgagaatgatatgtcttctgtgatctcctctaccggccgccgccccgcgctgctgattgccggtatcctgctcatcgccaccaccctgcgcgtggtctttaccggcgcggcgccgctgctggacgcgattcgtagcgactatggcctgaccaccgcgcagaccgggctgctcactaccctgccgctgctggcctttggccttgtctcgccgctggcggcaggggttgcccgccggttcggcatggaacgcagcctgctgctggcgatgctgctgatctgcgccggcattgccctgcgctccctgccctccgctgcgctgctgtttatcggcacggcggtaatcggctgcggcattgcgctgggtaacgtgctgctgcccgggctgattaaacgggatttctcgcaacatgtcgcgcggatgaccggcgcctattccctgacgatgggcggcgcggcggcgcttgggtcggcgctggtggtccccgtggcgatggccggattcggctggcgcggggcgctgctgctgctgatggtcttcccgctactggcgctcctcagctggctgccgcagtcccggcgccgggcggagacgccattgaccggctcaggcgctatgcataaccgggggatctggcggtcggcgctggcctggcaggtgacgctgttcctcggcatcaactcgctggtctattacgtgattatcggctggctgccgtcgattctgcagagtatgggctatagcgaagcgcaggccggctcgctgcatggcctgctgcagctggcgaccgccgcgcccggcctggcgataccgctgatcctgcatcggctgcgcgaccagcgcgggatcgcggggctggtcgccctgatgtgcgccatcagcgccgccgggctgtggctgttgcctgagctggcgatcggctggacgctgctgttcggctttggctccggagccaccatgatcctcggcctgacgtttatcggcctgcgcgccagctcggcgcatcaggccgcggcgctgtcagggatggcgcagagcgtcggctatctgctggccgcctgcgggccgccgctgatgggcaggatccatgatgccaatggcgactggcatattccgctgctggcggtggcgctgatttcgctggtgatggcggtctgcggcgcgctcgccggacgtgaccgggaaattcacccctgaagatgaccggcagcgcccgctgccggtggaattattgtgccgcggcgcggagaaacgcctgcaccagcggcgcgggacgcccgtccagcgcgtgacgctcatgctggaacaaggtggcgacaaaaaacgggtgcgtcaccagctcgacggcgcggatctcaccctcttcatcccagccggtgacgcgcagatcgccctgctccagctccgccgcaaacgcgctgctcacgccgtaccggcagtggtagccctcttcaatgctctcccggccataggcgcgggcaatcagcgtattcgcccgcagctcgacgacggcagaggtctccaccagcgagcagctgaggggagcgatcaccatccgcccttcgctgtcggtttccgcatgtccggcgtcctgccagccgagcacgttgcgggcgtattcaatcaccgcgtgctgaaagccgccgcaggtgccgaggaaaggaatgctgttttcccgggcatagcggatcgcggtaaacgcgccttccgggtgtcgatacgggctgccgggaacgacccagatggcatcgtactccgccagcgcctcgccggaggcgatcgacggggtggcgagccagtcatatttcaccggctgctccagcacggcggcggcatcgtctatcgccaggggaatggcctgatgggcaacaatatcggggtgataatcgccgacaagggcgaggcgtaaaggagttttcatagcaggttccttatgtctggacgagacggacagcacaaggcacgtcagaatagcgatcccacctgtggaacacaatccttattttcaccccaccgccgtggccgacgggtgaggtatactggaaaaagcgcgtaagggagagagaatgaaaaataagcttttggtcagcgcctgcctgatgggattccaggtgcggtataacggtagtgagaaggcacagctggcggcgacgctgtcccgctggcagcaggcggggcggctggtgatccactgcccggagctggcggccggtctgcctacgccccgactgccggcggagatcctcggcggcacgggcggcgatgtgcttgccggacgggcgcggatcgtggaaagcgacggccgcgacgtcaccggacattatcagctggccgcctggctggcgctcagcgccgcccgggaagcgggctgtcaggcagcgttactcaccgacggcagccctacctgcggcagccagtatgtctatgacggttcctttcgcggacggcgcaaagcgggcgccggcgtggccgccgacctactccgcgcccacggcatcacggtattttccgacgggcaaatcccgcagttgctcgcctggatggcacagaaggagcaggatgatgattcagtgtaaacgggtgtatgacccgcaggaaagcagcgacggctatcgggtgctggtcgaccgtctctggccgcgggggattaaaaaagaggcgctggcctgtgatgagtggtgtaaggagttaacgccttccgctgagctgcgcaaagcctttcacggcgaggcgatcgatttcgcccacttcagccagcgctatcgtcaggagctcgacgcccatcgcgaaacgggcctgcggctggcggcgctggcgcaacgccagccgctgacgctgctgtacgccgcgaagaacaccgagcagaatcatgcccgggtgttggccgcctggctggcggccctgccggttacgatttagccggatgatcccggcgccacagcgcccactcgtcgagagtttcgccgctgggtagtttgcactgggtgctgacgccctgcggcgtttgcaccggcacccgggtgccgccggattgctgacagtataccgccgcggggttgggcatgccgatggttttcgtcggcgcagtgggctgcggctgggcacagccggctaataacagtggcagaatagccagtagctttttcattgttcctccctttcctgaatgcccggggattttagcctgaatctccacgttttctccatcttgcctgcacttttcccccgtagagtagccctgttctcgaactgaccagagaacagatcattccataatcaatgagtttttccccgtcgcccccgacggggctttttttcccaccgcgtggacaagtattccccagacagatgtgataaatttaaaaatatcactgtttatttgacgctgatgtccgtttgcagcccaatatgctggggtgacgtttggcgtgctggagctgtattattcatgtcagattttattcttgcccgggtgtcgcaaaccctcgctgcggaacagtccctggaaaccctggtgcgccagctgctggagatgctggaggcggtaacgcgaatggagtccacctacctcacccgcattgataccaacgcccagcggcagcagatcatgttcgcccacaacagcagcgaaatgcagatcccggaaggattttccgtcccctgggatgaatccctgtgcaaacgcgcccttgaggatcagtgtacgtttagcaatgacgttgccaaccgctggcactcctgcatcgccgcccaggagctgggaatcgctacttttttaagcattcccgtccgcctggccgacggctctctgttcggcaccctctgcgccaccagccggcaacaacagccttataacctcgaaggcgaacaggtcatgggcctgtttgcgaagctcatttcccactacgtggaaaaagacaccctggtgcaacagctgcaggcggcaaacgtcgcgctggagctgcactcgtctaccgatgagctcacccagcttcccaatcgccgcgcgctgtttaagcagctggcgttacgctttgcctccgcccgcgcccagcagcagcaggtctcgcttatttttatcgatctcgatggtttcaaagccattaacgatcggttcggccatccgtgcggcgacagctttctggtgcaggtcggcaaacgactcaccgctgtcgcgcgccgggaagatatcgttggccgccttggcggcgatgagtttttgatcgtcggtagcgcccagcagcctgccgcacagcaggcgtatgtcacgtccctgcgtcaggctctgtgcggcgcctacttcctcggcgaacagcgtatcgactatgagggcgccagcttcggggtggtcacctgcgatccgcagagtatcgatgttgaagcggccttacgcgctgccgatgaggcgatgtaccaggataagaagtcccgccgccaggagaatttcattcatattgactaaagtaccgcgatatccagtatcatgcagggcatcattcgtgggcacagggacacaatcatgaaattgggtattcttttcccggtggcgatctttatcatcgccgtcgtctttctcggctggttttttgtcggcggctatgcggcgccgggtggggcataatgaaaaaaagcaccattatcatgctggtcgtcgccatcgtggcggtggccggcacccagtttggctggtggtgatcgccgcggcgatattgcggagttatcctatcccatcaataagttaaccctttacactcacgttatccgccgcggcattctcggccccggggaataagaatagcgggagaagtaaggatgaaaaaaccgatcgtgttaccgttgattattgcgctgtgcacgctgttatcgggatgcattattgacgatggatatcacccccatcgccaccaccaccatcatcactatcatgacgacgactaatgcttcacgctgttgataagccgataagacagggcgaaccgcggttcgcccgttgacgcttaatcctgacgatcggcgccgaggaaaataaagccgagggggatagcgaagagcgcggtaaagacaatgctgtaaaccgtcaccatcgccccctgcaggaagaacatggacgtcgtccactctgagtacggcatattgtactcgctcaccacgcccccgaaggtcgcccgccccactaccgccagcgcgatagcaaacaccaccgcgagcgacagacagtattttttgcagtttttattgctgaggagtttttgcagaatcatcggggcttcctttttgctgagcgataaacggctgtatatgtaacaccaatgcaataaaaaatgaagggtttttgttacagggcagaataagagacggcgggccggtcagcgggtaaccggcccgtggggatcaggactgcagggtagccaggcgcgcggcgaacccgacgaaaaccagaccaatcaggctgttgccaagtttagccagcttcttgcgggttttgacgtagcgggtgacaaacgagccggagaggatcaaaaagctcatatagcagaagctaatcacctcgagggtcagcgccaggataaagaacgccacgccgggggttttggcgttgacatcgataaactgcacgaaaaacgacacatagaacagaatcgctttcggattggtcaggctcagggtcagggagcgcttgaggatcgcgctcgccggctccgcgctggcgtcggactggccgtcgcgctgggtcagcaccgcatagagcattttgcccccgagccacagcaggtaaattgccccgaggtagcgcacgacgttaaacaacaccggcgtggttttaatcagcgtcgccaccccggcgaaggccagaaacatcagcactgcgtcgccaataaagacgcccgccgccgccagatagcctttcttcaccccgtgggcaatacccgttttcagcacgaaaaacgtattagggccaggaacgaggatgataaacaccgccccgaccagataggttaaataattcagaacaccaaactcagcgaacactctgcactccttcgcgcacgactaaaacatgatccggctcacgttaccccaactgtcgggattttgaaagcgcagcctgtgcgggaaggttaatagacggaaggttcgcccagcgggcgggttttaaaacgacggtgtacccacagatactgctcgggagcgcgcaggatctcgcgctcaataaccttgttgatatagccggcggcgatctgcttatcctcacccggatagtcattcatcacctcgctgatatgcaggctatagccccggcgatccagcttacgtaccatgctgatgctcaacattttcgcgcccgataagcgggacaggacataggtgccgttggtggtcgccgcctgcgggacggagaaaaaaggtgcaaagacgctgcccttgggaccgtaatcctgatcgggcgcgaaccacaccgcttcaccggattttaaggcatgcaccagaccggtcagattgttgcgatcgatcatcgctttgttcgaacgcaggcgaccgcgggtttgcacccactccatcagcgggctgttgtgcggccggtaggtggccatcattggccgacacagccccatcgcgcgcccgcccagctccagcgacataaagtgcacgccgacgaccattacccctttcccaccgctaagcgcgtgattaaggttggcgaacccctcgacatcaaaccattttttgacccgctcgtcgctccagaaccaggccatgccggtttcgataagccccattcccagcgacataaagttttgatcgatcagcgtctcgcgcgccgctggcgacatgtccgggaagcagagttcgatattacgccgggcgatatgttcgcggcgtttaagaaagcgacgggaaaggcgaccagcgctggtgccgataaaatgcagcagcggataaggcagttgcacgattaaccagaggatgccgagcccgaaccaggtcagccagttacgcgggtgtaaaagttgtttattaaatacgcaggccatgatttttcctgtaaacattaattatgtggtaacgcttaaggaaaacagaatccatttatcatcattaggcggtacgtacagcaagttcgacaatactaatccgctgaaattccctccggcaagtaaaaaacagcaagctgacaaaaaaacataattgcggcacatatgttactaaatgtaaacttaaatcttgaaccacgcttaatatattcatcatgcatatcattttcacgctaatcatcagcgttactaacgaaaacaaccgaaagctgccgcagtgcggccctggccgccggtggcaggcgtccgctgagccgcgcgatcggcggtctgaccgcgttgggatgcatcgtagtctgtcaaagcgagtattaaacgcgtcccactgcgaaatgcatcttttttaatccgtcagcataaaaaagattaaaacgactttaagacaacaattaagaatagacttatttaaacctgcttttaaaataagcgcggtgcattgaaatactgtgcccgccggacaataaaaaatatttttttacgcctcgtgggaaacacaggtggagtgaatgatgggcaatcatccgccatcgatttgcatggaagccaggtcattgagaagaaagcacggcgagggtgtgaaaaacgccctcgccgcagaggatcagtaggtatggaaatattgctgaatcagctgcggatctttagtctgcgtcagcgcggtcatcagcagtatacgcgcttttgccgggttgagggagtcggccaccagcccgggctggctgtcatccggcggtacgacgccgctgccggtacgggaggctcgcaccaccacgatgcccgcctgctgcgcttttttgataccggcggcgctacgtaccgacaccgaccccgccccggttccggcgtagataataccgtcggcatgatgggcgatcgccgcatcgtacatatactccggatcgtcctggtaaccataaataatcaccaccttcggcagaaccttcagctgacgcacatcgaacaccgagcgcagcgtgtgaattttatccacccgcgtctcgaactggggttttccgcccaccacgacaccaagatagccctcctcgggcgcccggaaggtatccagcgaagtggcattagttttggtgacaaagcgcgccgcgccgatgcggtcgttaagcaccaccattaccccgcgtccccgggcatcaggatcggcggcgaccgtgaccgcttccagcaggttcatcggcccgtcggcgctgatcgccgtcgccgggcgcatcgccgcggtaaagaccaccggcttgttgcttttcaccgtcagattgaggaaatacggggtttcatccagcgtgtccgtgccatgggtgatcaccacgccatcgacatcgtcccgggccaatagtgcattcacccgcttcgagagctggagaataatatcgctggtcatattctcactgccaatattggccacctgctcgccctcgacgtgagcgattttactcatttccggcacggcgttaatcagcgtctgcaccccaatcgccccggctttatagccggttgtttgggtattgctggccgccgaaccagcaatcgttccgccggtggctaaaataacaatatgcggaagacgcgtctcgctaaacgccaggctgctcatcgtcaataacgcaatggcaagtaatgctctaaaattcatacaggtcactcccttcatagacattaatcaaacttacgcttgcttaatgcaaagggcttgccagaattcatttcttttctgggggggaaatggttaactatcagacaataataaggttcttaggacgatatcgcccaactctggtgcaccactggatctgaaacgggcagagctatgaaccaaaacattctgagtatttacctgttcagcaacacacaacacgcattgcgatcagattatcgacacttccgtcaccggcgagagcatttttgcccgccaggtcacgcgaacggagaacagagatgcgtattgccctgaagtcggccctgatgctgaccaccagagtcatccagatcattaaccctgaactgcaccggcatatgcaacgaacggccttaatcgccctgacgctggcgcaaaggctggaactgcctgacgaacggcagcagaccattttttgcgccgcgctgctgcacgatatcggcgtgctgggggataaacgcaccattcattcgctggatgctatcgataatatccacgacccgcatcagcgccagggtgtggcgatgctggagggattagcgaccttccagcccatcgttccctttattcgcgatcaccattttagcccgaaccaccggggctcccgcgaacagcacattgtctattttgctgatgcctttgaacggctgctgccggccgatagccacgttgccgcctggcccacgcgggcggtggtggaacagttcgtcgctttgcatcgggagatcgatccgccgctctgcgatatcctgtgcgaggtcgctgaaaatgcgaacttctggcagcaccttcaccccggccatattcagcggctgctggagattattggccccatcaacacgcgctatctggatattcacggtctgaaggatgtctgcctgctgattgccaaaatcgtcgacacctacagtagctttaccgccacccatagcatcatggtgggggaaatcgcccgccagcttgcccgctggatgcagctgccggagcccacctgtcagcaaatacagatagccggctatctacacgatattggcaaggtctatatcccactctccattctcgaaaaagagggcgagctggatgatgaggagctgagtcaggtgcgggagcacagctacatgaccggcgaacttctcagcgactatagcgagctcggcgacatcattaactgggcctcgaatcatcatgaaaaaatggacggcagcggctaccctctgcatctcgaaaaggagcacctgaccctcgccgaccggattatctccatcgccgatattttcaccgcgctgaccgaagatcgcccttatcgtaaagggatggcctggcaggaagccttacagattatggaagcggatgttataaatggcgctctggatagcgatgtcttcctcgttttgcgccaccatgcggaaacgctacacgccatcattcttcagacccttgcccctctgcatagcgagcgccgcctctgaagcgggccgccgtcgtggcgggggcggagttctataatcaaaacagcttcatctgcatgcaaggaaattcacggtgagaatcgccaccatcactaactgggcttacgggatcaccgttggcctgacgctggcttccgggagcgctatgctcatggcctccagcgccgaccgcgtcgaacgccaggcggtacagcagcgccaggtctttgataccctctccgacgaggtggaaaacgacgcctgggcgctgtctgacctcgcccggctgtacgtgataaagccttcgccggagacgcttacgcaatatcagcagctgcagcagaccgacaagagcatagagcagcggctgggcggcctgaaagataacggcgccagccgcgaggagctggcgctgctccaggatggcctgcggatcgccaatgagctacaggatgaacagcaggcggccctggcgcatgtcgctcgcggcgatgcgccagcggccatcgcggtgctgtacggcaccgcgtacgagactgaactggagcgcatgcagacgcagatcgatcgcttccgccagatgcttgagcatcgcgccgccgtcgctatcgaccaggccaccgagcgctcgcggatctggcgtacgctgtcggaaatcatggtcggcctgaccgccctgatgtttttgttcgtcctcggcttcattctcaaacgccgggtgctctacccggtggttcgcctgagcgacgtagtccagcgtctcgcctcccaggattatgcggtagagacgccgcactttacccaggtggatgagattggtgacatggctcaggcgatccgcatttttcgcgagaacggcctggcccgccagcggctggagcagcagcgcgacgccgactgggcgatccgcgagctgctggcgcgtatgactcagcggctgcagggctgtgaaaccattgaggatgtgattaaggtggcggagcggtttgcgccgaatatcgccccgacgatccccggtaaactgtatgttctggataccgacccctggcagatgcgctgcgtagcgcagtggctgtcgcccgccggtgagacgacgcccttttctcccgacgactgctgggcgatacggcggggactcagccatccgccggtgcagggcgagcccgatatcacctgctatcatctgccggagacgcacgccggccagtcgctctgcgtaccgctcatcgcccagggcgaagccattggcctgctgaccttccagaacgtcaccgccggtgacgctccttcccgggcctatctcgagctgatggcggaagcgttgggcctggcgctggccaatcagcgtttgcgcagcgccctgctggaaaaagcgctgttcgattccctgaccggcctgcgtaaccgccatcatcttgacgaagcgctgcattcgcagatggcgctggcggtccatacccatactccgctgagctgtctgatgatcgacatcgatcattttaaaaccatcaatgatcgctatggccatgaggctggggatctggtgattaagagcgttgcgaccattgtgcagcgcgcggtgcgcgatatcggcatggctttccgctacgggggcgaggagtttttagtgctgctccccgggattgacgaagccggggcgcaccagtgcgccagcgagatctacacccaggtgcgcaatatgacgctgcgtgatggtctgaccgagataggccaggtggatgtgtcgattggcatcgccagctacccgcagcacacccaaagcgatagtctgcttcgcgcggcggatgccgcgctgtaccgggcgaaagagctgggccgttcaaggattgtcagctttggccgcctgaagaccagctaaccgggactatcgctcagcggtattaagcagcgagataactttccttaccaccgccgaacgaatatggcggtggtaaaccatgctcagctcactctccgccagccgatcctggagatcgatatacaccacgttatcaaggcgtaaggcccgcgccgagagcggaaccaacgccactcccaccccggcggagaccaggctaatcatcgaggtaacgtcgttaatccgctgcgccacctgcggcgtaaagcccgcgacgcgacaggcatccataaaaacctgctccagtccggtgccctgcggatcgtcaagcgagatccagttgtcagtgcgcaatgaggccagattaagcgcgcccacgccggccagcggatgctgttgatagagggccaggcagagcttttcacgtacaaacggcctgaccaccagcgcgtccggcggcgaggccagcggcgcgcggatgatggcgatatccagacgcagatccaacagcgcttcgtagagcatttgcacatccccctgcaccagcgacagctcaatccccggccagtcggcgcgcagccggcgcaggagccccggcagtttactgtcgtacatcgcgctggagacataccccaaatgcagcctcccctg

SEQ ID NO: 201 - DNA, 14582 bp, Unknown
  source: /note="Description of Unknown: MKP2_2161_1 Mutant Bacteria sequence"
taggcctgccgccagcgttcaatctgagccatgatcaaactcttcaatttaagtttgatgctcaaagaattaaacttcgtaatgaattacgtgttcactcttgagacttggtattcatttttcgtccgaggacgttaagaatccatgtcactttgagtgcccacacagattgtctgataaattgttaaagagcagttgcgacgcgctttagcgctctgtcgcgaggtggcgtatattacgctttcctctttcagagtcaacccgtttttcaggatttttctctgcaaccgaaccggctgtttgtgtgaagtgattcacatccgccgtgtcgatggaggcgcattatagggagctctccgggaatgacaagcggaaaaatacaattttatttcaaccgctcatcttttaaacgcaacgcttatttttgctgctttttaatcgccgccggcagctctgccaggctatttagcacccaatccgccgctttttccgcttcttcagttaggggtttaccggtgcgcaccagtactttagtcccgacatccgcagccgctgccgcctgcatatcttccagtttgtcccctaccatataagaagcagccatatcgatatgcagataatcgcgggcggaaatcagcatccccggatgcggtttacgacaatcacaggtctgacggtactcctcaaccgcaccctgcgggtgatgcgggcaatagtagataccgtcgaggtcgacgccgcggtctgccagagaccagtccatccattcggtcagcgtttcaaactgggcttcggtaaatttaccgcgggcaataccggactggttagtgaccagcaccagcgcgtagcccatctcttttagttcgcgcatcgcgtcaatgacgccatcgataaattcaaaattgtcgatttcgtggacgtagccatgatcgacattaatagtgccgtcacggtcgagaaaaattgcgggtactgactttgccaccggtttgctcctgaaaaagactagtgccgctagtatcgcatgtttccgcatgcaagaaagtgctcattataaagagtcagattgatttagacgtctggatgccttaacatccatttcattgccaggcatcgcctggatacggcagaagaaaatgccacggcaaacggctaaacgataataaataactgatgattaaactttccaatatcaccaaagtattccagcaggggaatcgcagcattcaggcgctgaataacgtcagcctgcatgtccctgccggacagatttacggcgtcatcggtgcctccggcgccggtaaaagtacgctgattcgctgcgtgaacctgctggagcgcccgaccgagggcagcgtacaggttgacggtcaggaactgactgccctgtcggagaaagagctaacccgcgctcgccgtcaaattggcatgattttccagcattttaacctgttggcctcgcggaccgttttcggcaacgtggcattacccctggagctggataacacgccgcaggctgaaatcaaacgccgtgtcacggagctgctggagcttgtcggcctgggtgataagcacgacagctacccggccaacctctccggcggccagaaacagcgcgtggcgattgcccgcgcgctggccagcaatcctaaagtattgctgtgcgatgaagccaccagcgccctggatccggccactacccgttccattctcgaactgctgaaagacattaaccgtcgcctgggcctgactatcctgttgatcacccatgaaatggacgtggttaaacgtatctgcgactgcgtggcggtcattagtaatggtcaattgatcgagcaggacaccgtgagcgaagtcttctcccatccgaagacgccgctggctcagcagtttattcagtccactctgcacctcgatattccggatgactatcaggcgcgcctgaaacctaccgccacagcggatagcgtaccgatgctgcgcatggaatttaccggccactccgtcgatgcgccgctgctctctgaaaccgcgcgtcgcttcaatgtgaataacaacattatcagcgcgcagatggattatgccggcggggtgaagttcggcatcatgctcaccgaaatgcacggtacacaggaagacactcaggcggccatcgcctggctgcaggaacatcatgtaaaagtagaggtattgggttatgtctgaggcaatgatgtggctgctgttgcgcggcgtatgggaaacgctggcaatgacttttgtctctggcttcttcggttttgtcctcggcctgccggtgggcgtgctgctgtacgttacccgtccggggcaaatcgtcgccaatgccaaactgtaccgtacgctgtcggcgctggtgaatattttccgctccatcccgttcattatcctgctggtctggatgattccgtttacccgcgtgatcgtcggtacctctatcggcctgcaggcagcgattgtgccattaacagttggcgccgcgccgtttatcgcccgcatggtggagaacgccctgctggagatccccaccggccttattgaagcctcccgcgcgatgggcgccacgccgctgcagatcgtgcgcaaagtcctgctacctgaagcattgccgggtctggtcaacgccgccaccatcacgctcatcacgctggtgggttattccgcaatgggcggcgcggtgggcgccggtggcctaggtcagattggttatcagtatggctatattggatataacgccaccgtgatgaataccgtactggtattgctggttgttctggtttatttaattcaattctctggcgatcgcatcgtccgggctgtgactcacaaataacgttattggcagacaacactcattcttacaggaaggaaataacatggcctttaatttcaaaacttttgcggcagttggcgcgttaatcggttctctggcgctggtgggttgcggtcaggatgaaaaagatccgaatcatattaaagtcggcgttatcgtcggggcggaacagcaggtcgctgaagttgcgcagaaagtagcaaaagagaagtatggccttgacgtagaactggtgaccttcaacgattacgttctgccgaacgaagcgctgagcaaaggcgatatcgacgtgaacgccttccagcataaaccgtatctcgatcagcagattaaagaccgcggctataagctggtggctgtcggtaacaccttcgtctacccgatcgcgggttattcgaagaaaatcaaatcgctggacgaactgcagccgggctcacagatcgccgtccctaacgatccgactaacctcggtcgttccctgctgctgctgcagcaggtaggtctgattaaactgaaagacggcgtgggcctgctgccgacctcgctggacatcgtcgagaacccgaaaaacctgaagattgttgaactggaggcgccgcagctgccgcgttccctggacgatgcgcagattgcgctggccgttatcaacaccacttacgccagccagattggcctgaccccggcgaaagacggcatctttgttgaaggtaaagagtctccttacgtgaacctgattgtggcgcgtgaagacaataaagatgctgagaatgtgaaaaaattcgttcaggcttaccagagcgatgaagtttacgaagcagcgaacaagatctttaacggcggtgccgtgaaaggctggtaatcttttctcaccgtaatatcattcaggacgggcttcacgcccgtcttgtcatttatgcaagcacctgattcaataacgccctgttttttattcattgaggaaatactatgcgtgctttaccgatctgtttgttagcactcatgttaagcggttgttccatgctaagcagatctcccgttgagcctgctcaaagcactgcaaccccgccggttaaatctgagccgagcaaaccgcgcgccacccgcccggccccagtacgtatttacaccgatgcgtcagagctggttggtaaaccgttccgcgatctgggtgaagtatctggcgagtcctgccaggcttcgaatcaggattctccgccgaatatccccaccgcgcgcaagcgcctgcaaattaatgccgcgcgtatgaaagccaatgccgtcctgcttcaccgctgcgaagtgaccagcggtacgccaggctgctaccgtcaggccgtttgcctgggttcagcgcttaacgtctcggcgcaatgagcgcatttcagttcgcgcagataggcgtcatccgttcgccgtataaagagaagtttgccgttcctcgccagccaggcctggtgaaacacggcggcggagaactccatctggtcgcgccctataaccaggccgacgccgtgcgtggcctggagagcttcagccatctgtggatcctgtttgtgtttcatcagacaatggaaggcggttggcgtccgacggtgcgacctccccgactgggcggcaatgcgcggatgggcgtcttcgccacccgttcaacgtttcgccctaatcccatcggcatgtcgctcgttgagctcaagggcattcgctgtcagaaagatcaggtaatactggaactcggcagcctcgatctcgtcgacgggacgccggtggttgatatcaaaccgtatcttcctttcgccgaagccctgccggacgccagcgccagctatgcacagcaggcgccgctggcgggtatgaacgtcagctttacgccggaaatagacgcacagttactcacgctggaaaaacgctacccacatatcaaagcgtttatccgcgaggtgctggcgcaggatccgcgtccggcctaccgaaaagaggaacaagcgggaaaaacatatgccgtctggctgctggatttcaacgtccgctggcgggtgactgcctccggttttgaagtctttgccctcgaagcgcgctaattttattttcctctcttttggcatctttgccacactggtaaactaaaccactttttttgtttcaggctgggcaaccagcctgttccgctcgtttaactggaaccgttacaacatgcgtactagccaatatctgctctccactctgaaggagacacctgccgacgccgaggtaatcagccatcagctgatgctgcgcgccgggatgatccgcaagctggcctccgggttatacacctggctgccgaccggcgtgcgcgtcctgaaaaaagtcgaaaacatcgtgcgtgaagaaatgaacaacgccggtgcgatcgaggtgttaatgccggtcgttcagccatctgaactgtggcaggagagcgggcgctgggagcagtacggcccggaactgttgcgcattgccgatcgcggcgatcgtccgttcgtcctcggcccaacccacgaagaggtcattaccgatctgatccgcaacgagctgaactcctataaacagctgccgctgaacttctatcagatccagaccaaattccgcgacgaagtacgcccgcgtttcggggtgatgcgctcccgtgaattcctgatgaaagatgcctactctttccatacttctcaggaatcgctgcaggaaacctacgacgcgatgtatgccgcttacagcaaaatcttcagccgtatggggctggatttccgcgcggtacaggctgacaccggttctatcggcggcagcgcctctcatgaattccaggtgctggcgcagagcggcgaagacgatgtgatcttctccgacagctccgactacgcggcaaacatcgagtttgcggaagccgttgcgccgaaagagccgcgcgcagccgccacccaggagatgaccctggtcgatacgccgaacgccaaaaccatcgccgagctggtggagcagttcaacctgccgatcgaaaaaaccgtgaaaactctgctggtgaaagcggttgaagatagcgcttccccgctggttgccctgctggtgcgcggcgatcacgagctgaacgaagtgaaagcggaaaaactgccgcaggtcgccagcccgctgaccttcgccaccgaagaagagatccgcgccctggtgaacgccggtcctggctccctgggcccggtgaacatgccggttccggtgattatcgaccgtactgtagcggtgatgagcgatttcgccgctggcgccaacatcgatggcaaacactacttcggcatcaactgggaccgcgatgtcgcgacgccggaagtggccgacatccgtaacgtcgtcgccggcgacccgagcccggacggtaaaggtaccctgcttattaagcgcggtatcgaagtgggtcatatcttccagctggggacgaagtactccgaggcgatgaaagccgcggtccagggcgaagatgggcgtaaccagatcctgaccatgggctgctatggtatcggggtgactcgcgtggtagcggcggcgattgagcagaactttgacgatcgcggtatcgtctggccggatgcgattgcgccgttccaggtggcgatcctgccgatgaacatgcacaagtcttaccgtgtgcaggagctggcggagaaactgtacgccgagctgagcgcccagggtattgaagtgctgatggacgatcgtaaagagcgtccgggcgtgatgttcgccgatatggagctgatcggtatcccgcacaccatcgtgctgggcgatcgtaacctcgacaacgatgatatcgaatacaagtatcgtcgcaacggtgagaagcagctgattaagaccggggatattgtggaatatctggttaaagcgataaaaggctaacacccacctcagggccctgaacggatgtcagggccttttttttacaaggacagtaccaatgactgcacatctcctccgcagcggactgcttacttttgccctgctcctacttaccgcctgtaccctggacgtcggccgcagctcgccttccacatctgctgccgatgaccattcatcatcctgggctgttaccctccagcgtcaaagctcgattgccggcagcggactgcgcgaaatcgccgaaagcgacctgcgctccggcgacctgctgttctcctccagcctgggcgtcacatcgcttgggatccgcgccttcagcgcctcttccgtaagccacgtcgcgctgtatgttggcgaaggtcaggtagcggaagccaccggcgccggcgtacaagtgattacccttcagcaggcgctggcgcacagcgataaactctttgctctcagggtgcctgacctgacgccggaccaggcgacggcgatgaaaagttttgcctggcaggtcaaagacagcgggtataactatcgcggcattattcagtttatcccttatatggtcaccaaaccgctctgctcgctcaaccccttctcacgagactttcgccagcagtgcgtcagcggcctggctaaagcgcagctgggcgatgcggcaagcggcgacaagaaagcgtggttttgctcggagtttgtcagcgaggcctttgtccgagccgggcatccgctgacgctcgcgcaggcggcgtggatcagtccttccgatctgctgcacatgcgggaaggagacgtcgccacgtttaaacccgaaacgcagctccagtatgtcgggcatttgaaactgggagtttatcttcaggccggtaagctggtggggctgaacaaaccgaaggacggtgcggagtaaagaaacgattgacgcttttccgccagccagatccacgctcactcttgatgtgacagggctaataacaggaggaagtaggtggtactgcgcgggatcatcccctgcccgttacccggacaggggcctgacaatcaatggctgcagtctttaccgggaataaatttgccggcttgatccgtcatcagcgttttcatcatctcgccggtatccgggttcgcttcgagagtaaagtgcccttctaccaccagcagtaccgggcgagtatcggtcccgcgcgcggcggcataatcccgttcaagctgggcattgttcgccaccgcgacgcgtttaccggtcgcgcaatcggtaaaggttgccgcatcggccatatagaaatacatgccgcgcatcgccatcggcgtcgtcggcaggctggccttcactggctccagggtatagttgagaggagactgaatggggcttccgttgcggtcgagcatctccagcttgtcgcctttcgcgcgaaagtaagatttctcgcccttgctgttggtcagcaccagcttatccgcggtacgtgcccaggtgccgtacgaggcaaaggatgacggctcacgacgggcgccctggtagtgctcattcatcacccaggtcccgtctttttccaggaacagcgaggtgtcgataccttcgcaatccgcgcaaggcagcacgcctcgccagctttgctgcatcggcttgagctcttccatcgccgctggctggaccgtgtcagtctcggcgcgatggttacaaccaaacagcgcgaacagcgaacaggccgctatcacggagaatacgattttcttcactttgctttccttatcatccatttcacccgttcgccgacgccttcactggcgaactttcccacgcagcgccttgactgaggacttctgtgccttggaagcaaggcgtcgctctttcgatgcccgagtcggtcgcgtctcccggcgacttttttgcactgcggttaattctttaataagggccaccaaccgggcgatcgccgcttcacggttcatctcctggctgcggtattcctgagccttaatgataaccacaccgtcagcagaaattaagtggtggctggcggcgagcaggcgctctttgtaaaactccggcaggcttgaagctttaatatcaaagcgcagatggatcgccgtcgacgctttgttcacatgctgcccccctgctccctgggcgcgaatgcctgacaagacgatctcgtcgtcggcgagggctacgctgcggctaatagtaatcatgccgacgcttgccaggcggtaagctgaatttccagattattccgagcgtcggataaccagatactgccctcctgcagagtggcctgcagcgtcatggtacggtcggcaaaggcgctaagcagtgccagttgcgcatcatcaagataccagatggtcagcttcgggtacgccgcaagcttgctctgattctgctgccaccagatttcagctgcccggctattataagcaaacagcgccaccgcctgcgcccgtgagcaggctttcttaatccgccgctcatccggcagacccagttcgatccacagatcgaccccgagatgatcgttaagcagccacagctccggctcgtcatccgacgatagaccgcgggtaaactgtagccgttcatcggcatatttgatccatgccagcaggcgcagcatcatgcgctcctgggtttctgacggatgctgagccagcgtcaggttagcatccagaaactggttgcgatccagatcggctacatttaccgcagctttatatattgtcgctttcagcgccatgaataaactcctgaaaagaatggcgtacattgtagcgaaactggcggcaaaaggctgtcgtcaatcgcagcaacctgtttcatcctgctgaaattgcttaaatgactatgatatagttcccttgctaaacagagtttatcttcgtaggcttaaacttgcatcccacggttgagtcagaacgctgacaggagggcatgtggaccactattgtgagttaatacgcaagcggtatgcggaaatagccagcggagacttagggtatatcccggatgcgctgggttgcgtgttgaaagtattgaatgagattgcggcggatgaggccctttcggagtcagtcagggaaaaggccgcttatgcggcagcaaacttactggtgagcgattatgtcaatgaatgatacttatcaacccattaactgcgatgattacgacaacctggagctggcctgccagcatcacctggtgctgacgctggcgctgaaggatggcgaacagctgcaggcaaaggccagcgatcttatctcgcgaaaaaatatcgagtatctggtggtcgaactcgccggcaacgtccgcgagctgcgcctggataaaatcgccagcttcagtcacccggaaatcggcaccgtggtggtgagcgaatcctgaatcaaaaacgggcttaatcgcccgttttcctccacatcagcctgaccccttccccgtccttcacttcaccttctgtggtcacaaacagatcgtccgctgcggcaatcggcgtttcgccgtaaaacagcagcggcgtggtgtctcgtcgccacggagcaacgcccagctcctgccagagcttcttaagcttgcgtccgccatggcgcccgacaatatgcaggtggccgctggcgcgaaagcggacggtgaccggctcatccgccgacggcgggcgcagcctgccgccgggccgcagcgtcagctcgccgagaccgtccgccagccgcagcggctggcgccagtcgggccagcgctgaacgctgtccgtctgaccgggaagatacttcacccagtacaaacgctgttgaaaacggcggacggtaaattcccccagccgcagacaggggctggcatcttcccgcgccagcgccacctcgtgccagaggcgctcaggcacctcgcgggcgggcatcggcgcctgctgcccggcgagccagcgacgcagcagcgccgctcggcgcggcggactcatcgtcgccagcggcgcgatagccagcgagccatcttcggccaccagcgacgccagctccgccgccaacatctcgtccagcagttgttcctgctcggcgcacaggctggcgctgcgggcgacggcctcgctaaagtgcggccaacgctcgcgcagcaccgggatcacccgcaggcgcaggaaattgcggtcataggtatcatcctgattactctcatcttcgatccacgacagctgatgggcgagcgcccactggcgtagtgattcgcgggtttcattgaggagaggacgcagcagtcgactgccggcaaaggcagaggatggcgccatcgccgacaggccggtaggaccgctgccgcgttttaacgccagcagcagggtttcgcactgatcgtcctggtgctgggcggtcactaacacctcgccggcattgagcgtatcctgaaaggcctgatagcgcgccgcacgagcgtgggcctcgacgcccagccctccccgggctaacgtcacgtgatgcaccaccagcggcacctgccactgctggcaaatctgccgacaatgcgccacccagtcgtctgcgtgggcgctaaggccgtggtgaacatgcaccgcccgcagcgtcagcgagggatcctgttcccgcagcagcaccagctgatgcagaagaaccgtcgagtccagaccgccgctgaaggccaccagcagctggcgatggggatgaagcgtatgcgcaatatcagccgtcatatccacgaacataccgagaagtgatggcccggcacgttaccgggccagggtcgcgctggcaagatttactgctgatatatttccagcggcaggtcgtccggatcgctaaagaaggtaaagcgtttaccggtaaagggatcgacacgaatcgcttcgcactccacgccatgcgaggtgagatgggctaccgcggcgtcgatgtcatccacgctaaaggccagatgacgcagcccgcaggcttccggacgactggggcgggctggcggaaacgggaacgagaacaactcaatcacatactcgccgttgagcgccagatcgcctttccaggaatcgcgctcggcgcgataaaactcactttgcagcgtaaaccccagaatatcgcaatagaacgctttactgcgggcgtagtcggtcgcaatgatggcaatatggtgaacccgtttcaaacccagcatggttaaactccttctgttaagccagccacgttactcgtgcgcgccgttaacgcgcaagcctttcgtcattttttaagactcgtacccgatacacaccgtcctcatcgcgcttggcgccgtgaatatcggtctcaaagcccgggtaatgacgaccgatagagcaaagcatcagcagaaaatcgagcaccgcccggctttcctcggtgatcatctctcccggcatcagcagcggaacccccggcggataagggaggatcatgttggccgaaatccgccccaccaggttctccagttcaatagtttccacctcccccttgatctggcgctgccaggcgtgatgcggcgtcattttcatttccggcaggacgtcaaaggcgctgagcatcagctgcggcagctgatgctgacggatcaagcggtggatcccctgcgccagatcctggatccgcatgttgcggtagaagtcgggatcttcggcgtacagatccggcagcatatttttcacccgcagattgagatcgtaggcgcgtttaaactcggtcaggccgcgcagcagccccatcgcccgggttttatcgatgccgatactgaacaggaacagcagattgtaggggcctgttttctctaccaccacgccccgctcgtcgaggaacttcgccaccagcgccgccgggatcccctcttcatccatattcccctgctcgtccatgcccggcgtccgaatggtgaccttcaccggatcgagatacatatgatccgcatcggcatctttgaaaccgtgccagtcctcgcccggcgctaccggccagcactcggctttatccacggcttccggctgccagatatcaaagaaccagccgtccgactcctcacgcagtcgctgcacctctttgcggaagtccagcgcccgctcaatggagcgctggatcagacgtttaccggagttgccgcgcagcatcgccgccgcggtctcaatcgacgcgacgatggggtagctcggcgacgtagaggtatgcatcataaaggcttcgttaaaggtctcttcatcatagttgcctttaatgtggatcagcgaggcctgcgacagcgcggccagcatcttatgcgtcgactgcgtctcgaagatgactttcccggggatccgctccccgctcataccgcttttcccctgatatatcggatggaaatgggtatagggcacccaggcggaatcgaaatggatcgacgggacatcgagcgtctccttaagccaggtggtgttatagagcagaccatcgtaggtggagttggtgatcaccgcatgcacgggccactgcgccccgcccgtgtcgcgcactttctgctgaatgctgtcgcgggtaaattcgcgccgggggataccgccgaggatccccagcgcgttgcgggtcggcttcagccacaggggaaccacatcgctcatcatcagcaggtgggccagcgatttgtgacagttacggtcaatcagcagggtgctgccggcgggcgccgagtacatgccgacaattttattggacgtcgaggtgccgttggtcaccatatagctttgctcggcgccaaaggcgcgcgcgatatactcctccgcctccaggtgcgggccggtatgatccagcagggagcccagctcggtgaccgaaatcgagacatccgccttcagcgtattcccgccaaaaaaatcatagaacaggcagcccaccgggcttttctgataggcgctgccgcccatatggcccggcgtgcagaaggtatattttccctcctggacatagttgaacagcgcgcgggtaaaaggcggggtgatattctccaggtactcgcgggtgtactgcccaatgcgggtggcgatctcttcggagagtcccagcgcatattcgaagaaccacagcgtcatgcgcaaatcctgactgctgacatccatcgtcgagtgggcgttaataaaggcgtacagaggaaggtattcattgagctgattgatatcgctgcacagatcgacgctgtattcatcccagtcgaagatcaccccgcagatgcgcgggttgtgctcgataaactgcagcaggtcggcgctgttttgcggccagatggtctggaagccctggcgctgcagcgccgcttccagttctttgatcggctcgtctttgtggtagacgccgtgaggccccatgatggcgatgatattcacgctttcctcctggtattaacctaagtcaagcatcatagcaatcccccgggcgcatcgcacataaaaaaagggccggaaaatccggcccttagtgttaagtcctgacgaaaaagttaagcgtaaccgtagctcatcagacgctgataacggcggttcagcagctcttcttcgctgagcagatcgaggtctgccaggtctgccagcagctgcgccttcaggcttgccgccatcgcttccgggttgcggtgagcgccgcccagcggttccggaacgatagaatcgatcagcttcagctctttcagacgcggggcgataatgcccattgcttccgcagccagcggcgctttatccgcgctcttccacagaatggaggcgcagccttccggcgaaatgaccgaataggtgctgtactggagcatgttgaaggatcgccccgccacgctgccgacgcgggacgtcgcgggggcggcgggggcggg

SEQ ID NO: 202 - DNA, 14102 bp, Unknown
  source: /note="Description of Unknown: MKP2_2161_1 Mutant Bacteria sequence"
ctgaaacgcggcgcctcttgcggcgccgcctgtctcattcatccgccatcttccctgcgctaaaactccagtcctccagttggttaaactggataaccaccatcacgtcctgcgggctgaccgccatctcatcgtctaaccgcgcgcagagccgacgatagagtccctgtttctgcgcccggctgcgcggttttccagcgaaaatatgaaacaatacgaagtaatagctaaccgagatattttaaaccgggcagggggcgagggaatataaacaaaagagtagagtcaatattactatcaaggccatcgttttataagtatattgaaaggccagatgatcataagaaatatgtgccggaacaatgaatgatctaatctgtcatcacaggcgttccttatttaaatccgatgattatttctgatgatgaacttgctgaattacttattaaattaatgaggtgaatggatggatttcttgaaaagatggttaaaagaagaattcattatttttttatggggatggggtattgtattattaatcattatatttagcatgattgcagtctttctttttcctgacattgccattaacttaataggactttttgttttattaatcattgggtttcacgttgtcgtttggtttaaagttaaaaactgatatgaaagaggaggggtaatgtcaaatccagcatatttatggttaactgatgagaatgattcgcctattataggttcttgcctgatgcccacacgcacgggttccatcgaattgcgcgcagtgaatcatcatgtttggttacctaccgataataatacaggaaagctgacgggaacccgtcttcatacaccggttaaaattcaaaaagagtttgacagaacaacacctttgttatttagggctctttgtgaaggtcgaacattaagatcggcaacgctaaaaatgtacagaataaatgaggcgggactggaggttgaatattttaacatagcgatggcgaatattaagattacgacaatcacaccaaatttacatccggccggaatgacaagtactcaccttgaagacattgatttccgttatgagacgatcacctggatatacacagaagggaacatcatgtatcgtgattcatggaacgatcgctgttgtgcatggtagcaaatgatatagtgctgaaacgcggcgcctcttgcggcgccgcctgtctcattcatccgccatcttccctgcgctaaaactccagtcctccagttggttaaactggataaccaccatcacgtcctgcgggctgaccgccatctcgtcgtctaaccgcgcgcagagccgacgatagagtccctctttctgcgcccggctgcgcggttttccggcgaaaatatgaaacagcacgaagcgggcgctgcgtccttcgctgaggtagtgcgggtcgtaaatgcgctgctcatcggcggcccgttcgataaactgaaatctatctgctgacggaacgtcgaactccgccaccagacactcatgaaagagcgccgacaattgagcaaactccgcgggacgccaggcggtgccaagcgaaattcgggtcaggggcatgacgcctcccgcgcgttcaggcaggtcagggcgctggccgccgccggccaaccggcatagaacgccagatgggtaaacaattcgacaatttcttcccggctcaggccattctgatagccgagcgcgatgtgccacggcagctgttcagttttgccctgcgccgtcagggcggaaagggtgatcaggctgcgttcgcggggcgacagctcgctccgcgcccagatatcgccaaacagcaccgtttcggtcagctcggctagctttggcgcgatagcagccagcgttcggcgatcgacaggaggagtactcatagtgattctctttgcaggttaaaggagtcatcactgtcacacgctgactaagatattgaatatcgcaacgttcaggattatcaatcctgaaaatcaggatggtatagccgatcctttacacctttcatcactccgcttttctgcccacctataccaacggtcaggcggcgatctttcgcgccacgataaacagccgtgggaaacgcaggagcaccttcccgttacactgtaacggatagtgtgcggccagcaatgcgaaatagcgtgtgagaaacgcgcttccggcctgctcgtccaggcctgccagataggggcgtaacccggtgccctgcagccagtcgacaatcgcctgatgagaagcaaggggatgaaaataggtggtgcgccagatatcaacttcgcaaccctggcggctgagcagatcgtaccaggcggcgggcgggagtaacggctggcgtccacggtccggcaaccccatctcgctggcaacctgacgcatcagggtatgggaaggttcctgccagttatccggcatctgcactgccagcgttccgttgtccgccagctggtttaccagatgggggaaaagcgtctcatgatccgtcagccactgcagagaggcgttggcatagatcacatctggcggttgcgcaggccgccagcgggcaatatcggcatcaatgaattcgcagtcgggtaaggcctgcgccgcctggaccagcatggccggggagttatcgataccgacgatagtcgccaacggccaggcggcgcgtagcaggcgggtgctgtttcccggcccgcagccgaggtcgacggcgtgctcgacctgcagatgggcaatacgcgagagcaggtcggccgcggggcgggtacgttcagcgtcaaattgcagatacaacgaaggattccagtcggccatcgggcgcagttcctgtgtgaggagggagacagggtaaagcatagaacgcgtcaggcggcatgtcagcggttaatgaacctcagcggtcacctttgtgcgtgacagtgtcacaaaatagaacgtggctggattgcgcctgcgctgttggccgaacctgggattgagacatggcagggaacgtctctgcgcccgtggcgggcgcaggagcctattcggcgtttttgagcgcctcggcgcggctggcggtggcgtagacaaaatccagcatcggctcgagatcggtgtcatagccagcctgaataatttttcctcgcagccattcgatttcactggtgatatcgggaggaaaaatgttgttatcctgcgcccggcgcagccatttcagcagaaagttattctttcccctgataccacctgcttttttcgattttccgtgcatcttcagcgcgaccaggacgcagtaatagaaatgaacgcgctgattaaaactttggtgcatgtctgtgtttcccgccagaatcaggaattcaccgtgtgggtcagtgattcggattggactacggtaccgggctggatcgttgcgcgaactctgttgtctaccagtaccgtccatgcatctgttgccagacgctgacgggatgttggcacggaagccgaatcgtcgtcaattgccgattcattttttgccggcgtcatcggaccgcggcggcccgcgagccgggccacactactctctggcgacaagccgctgttgccgatgtacgcggaaaatcagcaggaatgcgagcgccaccacgatcgccgccagcagatacagcgtggcgagatcgtagaacccggcgacccagccggccagcggcccggtcaggcccagcgccagatcaagaaacgccgagtaggtgccgagggcggttccctgattttgctcttccacctgttttaccgcctcaactcctaaagccggaaagaccagcgagaaacccgaaccggtgagaaaggcgccgacgccggccatccatgctgatggcgccagccagataagcagcaggccgagactttcgatgatgaagcaggccagggagaccgggactccgccaaagcgggtaatggtatttcccagcaccaggcgaacgcagataaagccgacgctgaacagcgaaagggtaaacgcggcgccctgccagctgtgcgcggcgaagtagagggtgataaaggtggcgataacgccgaaaccgacggtgccaaaggccagccccaggccgtaaggccagatttttcgcaccaccgcgtgaaagggcgctctggcgccggcggtcaccttgacgtcctggcgggtacgagcgaacagcagaccgatggccgcgaccagcactaccaccgtagcaaagccgctgatgccaaaatagtgattgagggtaactcccagcggcgccccgaccgccatcgccacataggtcgccacgccgttccaggagataacccgtgacgtgtggatcgcgccgacggttttgatcccccacagggtggcgccggtggcggtaaagctctcgccgacgccgagaaacacccggcccgccagcagcgcggcaatggccagcatcggcgttgcctgcaggactaccgccagtagcgtgaaggcgccactgagcaggcagcagacgatcccaaggctgaccacttttttcggcccccagatatcggtatagcgcccggcgtgcggccggcttaccagcgtcgatatgtactgcagactgatcacaattccggccacaaaggtgctgtagcccagctgatagtgaatatagcccggcagtacggccagcggcagaccaatggagagatagcagatacaggtaaaaacaacgatcgaaataatgcgcaaattgagttgtgtagtgctgacggaagtgctcatagggataagaggttaatacaacgggatgtgtagcatagcgcgccgtgaggacgctggcgaggcgcgacagcgttttatcggtaaccgacgggaacgatatttgtacgaatgtaaataactgcttttacagcgcttaacgcccgcctcgctcagcgtcagctcgccgccatacccgacgaatcacacaccatgccccaggcgcggttttgcaataccgtgcggtagccgtcccggtcgacgaaagtgacgccattgacctcccagtaagggttaaacgccgtaacgcgcagaaatccggcggcgtccatggctgcgcactgtgcctcccatgccgcctgctgcggatagtacagcaccagcagatcttcatcgcctggcgagggggtgacgggatggtggcggcactgggtgaattccagatgccagcccgcttcgggcgcgccgagcattatcccgctgaatccttcatgatcggtaaagctgccgagcagctcgagtcccagcccggcgcaatacatgctggcggtggtgtccagttcgctgaccggcctggcaatgcgcatatgacagaacgacataatgactcccgtgagcataagttgagttgatactgtaccggtaaatcggcccggcgtgtgttaagccgtgcccaggcgccaccttctctctgtaaataccatagcggattaacatccgccttgcgccaacaatacctctttatcataataaaaaaagaatcattcaatattattattcttaaattgagaatcactgtggggtggtggatgaataaccaatcgcgccaggccttatggctggcactggctggatcgatagtactgatgatcggcatgggctacgggcgctttgccttcaccggcgtgctgccgcttatgcttaatgaaggtctgttaaccctgcacgagggcaatctcgccgcgtcggccaattacgctggctatctggtcggtgcgttgctgctggcgcgggtgcagcctggggccgccacccgactgagcattatctccgccgggttgaccatcgccagcctggcgctgctggcctgggtgagctcgccgtggaccattattacgctgcgcgccgtcgccggcgcgctgagcgcgataacgctgattgcaggttcgctgtggctgctggaacatatggggcatcatcacggggctccgttgctgtatgccggggtggggctggggatatttatctcagcggaggggatcgcccttggacatgccctgagcctcaccagccagcagatctggctgctcagcgcattatgcgccggtctgctgctggcgctggcgatccgttggctgctgactccgccggctgcactggtgcgggtttcccatgttgaaacctccctgcctgcgtccgggagcgatacccgtcgcgcggcgtggcgactcttgatggtttacggtctggcgggcttcggctatatcatcaccgccacttatctgccgttgtttctgtccggttcgctgcagagcgttgacccggtccatctgtgggcgctgtttggtctggcggccgcgccgtcctgcctcatctggcataagctggtgctaaagtggggataccggcaagcgctgacccgcaacctgctcgtccaggcgcttggcgtgatccttccagcctgcagcgcttcattgctgttttgcgtgctaagcgcgcttttggtgggctttacctttatgggcaccgtaaccattgcgctaccgaaggcgaaaagtctcagccatcaggtgagcttcaatatgattgccgcgatgactgcactgtacggtgtgggacagattgccgggccgcttatcgccggcgcgctgtatcagatcgcggcttcatttaacccggcgctctgtgccgcggcgctggcgctgctgattgccgcagggctggtctttaccgaacgccaggcttagccaatcgccacgctttgcagcagcttgcgccactcgctcagggcgggggcgctcaagccgctgcgccagataagctgggtggtcgcctcgcacagcggttcgctaaggcagttttcgggaagcgtcatcagcgacagcacgctctgcggcagcaggcaggcgtagcgcccggacgccacgcaggcaagcatgctgtgataggaattgacctcatgcacctccacggccgcctgctgttccgccagccagcgttctcccagcgcgcggtagctgcagccgctggcaaatgccgcgaaccgcagcggacccggggtctgcggacggaccagcatcagggtttcataaaacaccggggtgaatgccagctcggcgggacaagcaggttgcccatcggcccctggtggcaggcagaccagcgcggcatcaagggcggcggttaacaccccctcggttaactggcgggtcggttgggtgatgagggtgatatccacctgtgggcactgctgttggaagcgggtaagcagcggcggcagccggctggcggcggtcgcctccatcgcgcccagacgcagactgccgcctggggttgtcggatgcagagcctgctttgcctcttccgccaggctcaggatccgccgggcatagctgagaaactgcacgcctgccggggacaacaccatttttttgttgccgcgaacgaagagctcaacggcaagctcctcttccagctgctgaatgcgggtcgtgatattggactgtgcgcggcccagccgttttgctgcctgggtgacgctctgcgtgtctgccacctgaatgaagatctcgagtgtgctgtggttcatatttttcttctcaatacgataataatgttgatcttaccatctttaaaggagatggtaagcctccggcatcgttaatgcatgaggaaaccatgagcaacccgctgctttcgcttcttgatattgattatcccctgattcaggccccgatggcgggcgtctccacccccgcgctggctgccgcggtaagtaatgccggtgcgctgggctcgctggggctgggcgcttcaaccgttgcccaggcggaagcgatgatagtcgccacccgccagctgacggaccgtccgttcaatgtcaatctgttctgccatgcgccgccccggcgcgacgcccggcgggaagccgactgggcaacaacattacgtccccattttgcccgctatggcagtacgccaccggattcgttaagcgagatctaccagacatttatcggtcatgcgccgatgctggagctccttctcgacatctcgccggcggtggtgagctttcattttggccttcctgaaggtgagacgatccaacgtctgcggcggcaggggatcgttaccctggcgacggcaacctcgctccaggaggcgctgctgattgaacagcaggggatcgacgtggtggtcgctcagggctatgaggcgggtgggcaccgggggatctttgctccgcaggcgcctgacgcgcagctgagcaccttcaccctggtgcaacttctgcggcgtcgactaaccatcccggtggtggccgccgggggcatcatggacggagcggggatcgccagcgtgatgcagttgggggcgcagggcgtacagctcggtacggcgtttttactgtgtccggaatcggccgccgacgccggctatcgcgcggcgatccacaacagccttgacgggcgtacggtgctgacctccgcgatatccgggcgtccggcacgctgtctggcgaatgccttctgtgcgctgggggaaggctatccggcgagcgccgtgccggattatccgctggcgtatgatatcggcaaagcactggccgccgccgcgaaagcccagggtgtccatgagtatggcgcccactgggccgggcagggggtggggttgatccgcgagtgtgacgccgccactctggtccgccagctggcggcagagagcggctggaactaatgactgacggctagcggcggtgggccaggctacgcaccagccgatcgccggccatttgcaccccctggaccatcgccaccaggatcagcactgtgccaaacatgacttcattattaaaccgctgatagccgtagcggatggcgaggtcgccgagtccaccgccgccgatcacaccggccatggaggagaaaccaatcagcatcacgatggtcagcgtgatcccggccagcagcgttggcagggcttccggcagcagggatttaaaaatcacgtgccagaagttgccgcccatcgacagaatggcttcaattctcccgtagtccacctcgtcgagcgcgttttccgtcagacgggcaaagaacggaaaggcgccgatggtcaccggcacgatggcggcggtgctgcccagcgtggtgccgacgatcaggcgggtaaaggggatcagggcgatcagcagcacgataaacggcagcgacctgccgatgttgatcaccgcgcctaacagcgcgttcagtttcggcatcggcgccagcccgttggcgcgggaaataaataacagcacgccggtgggcaacccgatcagcacggtaaacagggccgccaggcccaccatataaagcgtatccagcgtgccgtcgagtaataacggccacaaatcttcccagctcatgctactccgcataatggcctcccctgaacgccgtggcgggtaagaaattcctgttcagcctgcgggtcgtgcagcagcgactggcgcagccgcgaccatggggtcaccagcaggtcggcgagtttaccgctttcgacaatcccgccctgttccagcagcgccgcgtggtcacagatggttttcaccacctccagctggtgcgtaatcagcacaatggtcagattgaggcgctggttaatatccgccagcagggccagcaccgaggcggtggtctcgggatccagcgcactggtcgcctcatcgcacagcagcacttccggccgggcggccagcgcccgggcgatgccgacgcgctgtttttgcccaccggaaagctgcgacgggaaggcggcggccttttcgctgagatccaccagcgccagcagttcgcgcacccgggcctcgcgagcggccctcggcactccggcaatctccagcggcaccgcgacgttgtcagcgacggtgcgggcatgcagcagattgaagtgctggaaaatcatcccagtgcgcaggcgataatcccgcagcgccgccttgttcaactgggtaatatcctgtccgttcaccagaatgcggcccgaggtgggccgctccagtaaattgagacagcggatgagcgtacttttgccggcgccactgcgcccgagaatgccgtatattgcccctttcggtatctgcaacgcgatatcgttcagcgccggtcggccggttccggcgtaggttttgctcagcccttcgatggttatcatgactgaggggccaccgggatcaccgagccgttgtaggttttacggataaactccgccacctgcggtgacgtcagatctttcgccagcgccttaatgcgcgggtcattcgccagggctggggtggtcaccagaatattggcgtacgggttatgctcggcgctttccagccccagggcatctttcgctggcaccaggccggcttccagcgcgtagttaccgttaatcaccgccaggtcgacatcgtcgagggagcgcgggatctgcggcgattcaatctccagaatcttcaggtgtttcgggttctcgacaatatccttcggcgtcgccagggtggtggccgggtcggtaaatttagggtccagcttgataagcttctgcgcctgcagcaggaacagcgcccggctcaggttggtggtgttattcggcaccgccacggtggcgttttccggcagtgatgagaaatctttatgcttatgcgagtaaattcccagcggctcaatatgcacggtggccgcgacggcaaaggttttacccagcgctttttcctgatccttcagatagggaacatgctggaagtagttggcatccacatcgccactggccagcagttcattggcgttgaccccgctggtcagctccaccaccttcagatcgaggctgggatcgatttttttgatgtagttgaggatctccgcgtggggaaccgggtccgcggcgacgcgcagcgcggcagcctgggcagacgtccatgccagagaaagagacagtgcgacccctgccagtttaaaagcggcatatttcatggtgtgttcctttttagttatggttaaacgatcaattgctcggcgcgttcgcgaaacacgtcctgatagtagcgttccgccacgtccggatgggaacgcagacggcccttgagataattccagccgacatcgcgcagcagcggattgtgcgggtcgctgtccggccctcgcgcttcacgcgccagctcgggcggcagggtgtaaaccggcaccaccgcgtcaagctgggcgccgaggaagaaggcgatggagaggcgctgctgctgcgccggcggcgacaccacgcgatggacggtagcgcgcaaatacccgttggtcgccagctccagcagttcgccaatattgaccacaaagctgccggccagcggcacggcgtcgatccattctccaggcgcgacctcaacctgcagtcctttctgctcgtcctgcagcaggaagctgaggaaaccggaatctttatgggcgccgacgccctggctgctttgggtctcctgctggccgggatagcggatcagtttgatatgctcgttgggtttctcgccgtagagctgatcgaaagcattctccgggagctgcagggcttcggcaaaggcgcgcagcaggcggatgcccacctgggtcatttgctgttgccagtgaagtaataccggtttaagcgacggcagggcggcaggccacagattcggaccctgcagccgctgccagcgcggggcgtcgtcgctgagggtcagcgccggacgttcggcgccgatatcaaactgttctcgccagtcaggctggccgcgcgtcagctcagaggccgcgcggttatagccgcgaaaatggggggagtggatcatcgccacctgctgtttttgcgcctcatcgagagcaaaaaagcgctgggactggcgctgaacttcatattgaagcgcgtcgtcgacaccgtggttgatcaaatagaagaagccgatgtcgcgggcggcatgacgcaggtcggccaggaaggccgctttatccgcggggtccgcgtagcgggccaggtcgagaatcggcagggtggtcgcgttcattgtgttctccgaaaacggggtaataagttatgggtagattcaggttctgggttcgggcacaacagcagcgcatggtgatttcctctgtccggggctgaacacagcttgcctcaaggccaaataagcaaccaataacgttattttctaatttatgaccgcgcggggttcagtgcttttgcgttaaatagatataggcgcgaagcgcgtaatgaagtctgttgcgcccgtcggtgagagccagtaaggtaggcgcactttttaatgcggaacggacgtatcgtaatgcacagctcgaaagatcccctgcacggcgtgacgctggaagcgctgctcaattccctggtggcgcgctatggttgggcggaaatggcccgccaggtcaacattaactgctttaaaagcgatcccagcattaagtccagcctcaaatttctccgccggacgccgtgggcgcgcaaagaggtggaggctatgtatctcgcctcccttgatgatgacgcgccggtggagaaagcggatccctgggcaaactggcagaaaaaataacccttaccacaggacaccatcatgcagagctggagcagtaaagatttcaccgccgaccgcgcgtggggcgcgctggatattgccaatttttccggcaccaccgtgcgtctacactggaccgaccaaccctatatctggcacatcaatgatggtcaggaggtgtttgccgtgatggatggtcaggtggcgatgcatgtgaaagtcgacggcgaggagcagatcatcatgctaaacgccggcgatatcttctacgccggggtgggatgcgagcatgtcgctcacccgcagggggcggcgcgtattctggtgattgagaaagaagggtcggtctgaccccgcggcgggcggttctttgcccgccgtttcatcgcctgtcagatgcgacataccgcgttgatataaatcacttatcctgctttcgatatatttaattcttgtttgccattcccttcaccccagcactatcttttgccgcaggcgcctgaccaggcacaatcgcgggagagatcatggcaaccttgcagtgggaccacgcagtacagtttgtgaatcagccggaagcggcgattgaaatctttgccgggcagcagctgcgggcggtggccggtgggcgccatccggggtggggaacccgtaatgcgctgagctattttggcctgacgtatatcgaattcctcgccattgccgacccggacgaactgcgcgccgcgacggacaaattcctcctttcgcgcgacgccgcacggctgctgccggagaatgaggcgctgtttcgggtggcgctgcgcagcgacgacatcgacgccacccatgaccagttgcgtcgcacaggggtgacagtgtcaccgattgtcgatggccagcgcaacgatccgcagggcaatatcatccgctggcggatcttcaccatcgatggcgacactgccgggctggtctatccctttgtgctgcagtggggagaagacgacgccacccggctgacgcggctgcgcgcccagaggctggacgcgccgcatccgctgggcgacattacgcttgagcaggcggtgttcgaggtggtcaatccgcaggcggtgcgcgatcgctggcaggcgctgctgggctttccgcccctgggggagcagggactggacgtgggcggccagcaatttatcttccgtgaaggggctgccaaccagctgaccgaactggtgttccgcgtcgccaacccggcgcttaaggggcagcgctttcgtgtcggcaacggcgtgtatcgctttacataaaggctgactctagcgtgccgtggcgcgcagggcccccggcggctggccggtgatgcgtttgaaagcccggctgaaggccgccagcgattgatacccgaggctgaaggcgactttttccagcgcctggccttcatgggtgatgtactgcaccgctagccgcatacgcagctcggtgagatctgtctcttatacccctcggacgcggccgaagagcgaactagctgagatctaggggggcgccgcgcgaggaacaaaaaaaaagagagatggaggaaggatgagcggagggacatggcagacgcgtga

SEQ ID NO: 203 - DNA, 12602 bp, Unknown
  source: /note="Description of Unknown: MKP2_2161_1 Mutant Bacteria sequence"
gggggtgttttcggtctcgccttgcgcttctccgtctggctgttgttctcttttttttttcattttccgccctccccctgctcctatactcggttgcgcgtgggcagcgtcagaggtgtataagggccaggggcgttatagcgtcggttgtcgttagccagtttttcggttgccgccgtggcggccagtatcgaggccgcagagccggcaatggtcgcctgctgaagctggcgggtagcctggatatcggccagcgcggcctgctgcgccgccacttctccggcggctttcgcgagggcggcgcgataatcgcggtcgtcaatgcggatcaacaggtcaccttttttcaccgccatattgtcctgcaccgccagctgctggatatagccggagactttgctggagatggcgctaatgtcgccgccgacataggcatcatcggtggtctgcataaagcgcccggtatgccaccagtaagcgccgtagctcgctgccgccagggcggcagcgcccagggccgccaggacaagaatatttttcttactggtcggattcattgctggcatctctgtaaggttccggctggaatttttgcccgctatcgccttcgcgtttgcgcagcagatattcatgacgatatttcatcagcggcgaggcggcggggcccggcaccatggcgtatttacccgggataatctcttccccagtcgctttatccaccatgactggctccacgtggcgctgggttgccatttccaccagctgcatctgacgcccttcgggggcgaagtggcgattaccccattccgccagcgccagcagcaccatgcggaaatcgcggccgcgcggcgtgaggtggtattcgtagcgcggcggggtgctgctgtagcacaccttctccagcagtccgtcatcgaccagttccttcaggcggcgcgacagaatattgggcgcggcgttgctgcttttctggaactcgtcaaagcgggtaaagcccgcgaaggcatcgcgcaggatcatgatgctccagctgtcgccgatgcggcccaggctgcgggcgatggggcagggagcgtggcaaagcggttcatttttcatgggctgtccagtaaccaggtggcttttgccagcaaattgacatagtaactatcaaaatgcaagttactcttcatagtacccagagaagaagctgctgccgtttcgctacgccgtttcacctttgaatgccgaatattggacagtcgccgccgccttatatctgcttgaccgtaataagagataaatatcgctgatggcagatgaaacattttaataatgataaaaatcgaggtgctgggtaatgacctttattgggggatacgatataaggtatggcgacactcaaattaacattctcataacttataaaggttaaataaatgaagcaggtgggtattgttggttggcgagggatggtgggttcagtattgttgcaacgcatgatcgaagaaaatgatttcgacgatattacagcgcatttttttagtacctccagtgcgggtgccccgggcccggttattaatggtaaaagcgacaggctgaaagatgcgaattcccttagcgcactcgccgaaatggatatcatcatcacctgtcagggcggggattataccaaagccatctatccggcgttaattaaccatggctggcaaggttactggattgacgccgcttcggcgctgcggatggatgaaaaagcctgcattattctcgacccggtcaaccgcgataatatcgatcgcgcggtaaaagcgggattgaaactgtttgtcggcggcaattgctccatcacgctgagcctgatggggctggccgggctgatcaaggctgacctgattgaatggatgagcgtgatgacctaccagtctgcctccggggcgggcgccaaacaggtgcgggaattaatcgcgcaaagcgcttatatcagtcagcatttatccgctgatgaactgacatcatcaggttccgtgctgccattggtaaataaagtgagtgagttgattaacagcgcgggcatgccggtggagaattttggcgtccccctcatgggcagcatcattccgtggatcgacagcgatctgggcgatggaaacagccgcgaagaatggaagggcgaggcggaaactaataaaattcttggccttgcgccgggtaccatcccggtcaatggtttatgcattcgggtcggggtgatccgctgtcacagcgcggcgattacgctgaaacttaaacgtgaggtcagcgaagcagaatttgctgagttagtcacccattcccatccgtgggtaaactatgtccgcaataataagcaagagagtgtcagtaaattgaccccggctgctattagtggttcgctgcaggtaggtattggccgctacaagaaaatgtcgctaaataatgacccagtctactcggtgttaacggttggcgatcagctattgtggggggcggcggaacccctgcgccgcatgttaaatatcctgctgggcaaaatatagttacggtcatccggggaaagccctcgcgcgcaggcggttaagacaaatgtttaacgaagcgtttgcgaacctccttgtagccgttattttcataaaattgatgcgctcttattcttttttcactacttgaaagctcgatctgagcgcattgtttatcacgggcgaggcgctctgcggcctggagaagctgctggcctatccctgatccacgtgacgattcctcgatgaccagcgcggaaattaatgcccataaacggttctcatgtaccggtaaaataaaattgataacgattacgccacacacggcgttttccgtttccgccaccagcgcactcatcatgctctgcggggcagtgatgcgttgcgctaagatcgccgtctccgtctgatagcccagctgcagaaatagcgtttgcagcgaggggatatcttttgcttcagcagctctgatgaacaccatgatcttcgactccaaatagcatgttaccggaccggaagcgggccggtggataccttagtctccggtccgctcccgtatacgccactcagtccatcagactgacctgggcggcgacaatccgccagccgtaggggaagcgtacccaggtctgctgctggcggcccaggcgggcgctgccctcgcgggtgaactcggtgctgcacaccgccatatccgcaccaaaggtggtaatggtggtatggcgcagatcgcgggccagaccggcggcggggcgggcggcgcgaaaggcgcggatcgcctcgatgccatacagattttcgccggctcccagccgtacggtgcgcgggtcgtgccagaacagcgcatccagcgcctcgatgttattgctgaccagcgcctcttcatactgataaaacgccgccgtcacctcggcgaggatcgccgggcggtctacattatccagattgatcatgctgcactctccgccactcgggcatcggtaatgcccatcgcttccagcgcccgcgcggcgcgaagacaggcttgttcgttaaacggcgcggcaatcagctgcaggccaatcggcttgccgctggcggtacgcaggggcacggtcaccaccggcaggccgaggaaggagatcggctgcgtcagcattcccatgctggcgcgcaccggcagcggctggccgttaatcaccatctcctcggcgcctattggcgtggcgctgcatggggtggccggggcgatcagcacgtcggcctggctgaacagggatttcattgcctggcgagcatgacggcgaaaacgctgagcctgcagataccacgcggaggggatcatcgcgccggccagcagccgctcgcgggagtgaggttcaaagcgctcgggcgagtggcgaagatccgtcaggtactgattgccgccttcgctggcgctgatgataaaggccgccgagcgggccagggcggcatccgcgaactgcagctcgctgtcggcgcccagcgcgtgggcgacccgatccatggccgcccgggcgtcgtcatcgcaccaggtggtgaaatagccccccagccgcgcgcagcgcagcccctccagcccccgctccagcaggttgccggtgcgctcgctggctttatcggcctgaaagtcatcggccgggtcgcgtccctgcagggcgtcatacaccgcggcgaggtcggccacccgacgggcaaagggaccaatatgatccagactggcgacaaacggatggctgccggagcgggagaggcgaccgaaggtgggtttcaggccaaagatcccgcacagcgacgcggggacgcgaatcgagccgttggtgtcgctgccgaggctgaaatggaccagtccggccgccaccgccgcggccgaaccgccggaagatccgccggcgatccgcgacagatcgtgcgggttgcgtgtcgcgccatagtggctgttttcggtggtaaagccataggcgtaggcgtccatattgagcatcccgctgagcagggcgccggcgctgtgcagctggcgcaccgcccagctatcgctggctgccggcggccggtcgctcagcagttcggcgccggcgagggtggtgtgcccggcgacatcaaacagatttttcaccgcgtaaggaatgcctgccagcggcggcagggggcgcttttcccggcgcagggcgtcgatgctgtcggcctccgccagcatgcgctgggcggtgacctcggtccaggcgttgatctgcggattcacgcgggcgatatcgtccagcgtctggcgggcgatctcccgggcgctcagttcgccttcgtgcagcgcacgctggatctcggcgatggtgaaatgttgaagtgtcatgctttatacacccccgcaatctcctcgcgcggcccgaggggatagtccatcagcggctgcgccatggcggcgatgcgggcaaactggcgctccagctccttacggcgcggcgcatccagctccatatccaacaggtgagtcatctgcgtcagatactcgctccagtctggctgtgtggtcatggtctgctccttagtatccggcggcggcgccgttgctgcgtggatcggtcgccccttcaagcaggccgttgggatggcggacaatggcgccggcgtggcccatcgcttcgctgaaatcagccagcacttctacgtcgtgccccagctcgcgcaggcgcgcgatacaggcgggggcaaagcgtccctccagcttcagtgaatcggaggactggccccaggtgcggcccagaagccagcgcggacgggagatgctctcctgcaacggcaccccctgcaggatatagcgagtaaacagcgccgcctgcgtttgcggctgaccgtcgccgcccatcgagccatagaccatcacccggccatcgttcaggcgggcggcggcagggttgagggtgtggaatggctgtttgccaggggccagcgccaggagatgctgcggatcgaggctgaaggccgccccgcggttttgccagacgatcccggtgtccgggagtaccacgccgctgccgaactcgtgatagatactctgaataaacgacactgccagtccgctgttatccacgacgcccatccagacggtatcgcccgggcctttgccgccgccccagggggaagcgctggcgtcgtcgatgctgtcggccagcggctgcagggcttccggggtgagcaactgctgtacatccacatccagatggcgcggatcggtgatatgcgcatcgcgcagggcaaacgcccgcttggtggcttcgacgatacggtgcaccgtttgcgcgtcgtcggcatcggccatcttcaggcggtcggtgatgccaaggatcgccagcgacaccagtccctgcgtgggaggggcaagattccacagcgttccctgctggtgctggagcgtcagcggccccggacgcctggcgcggtgggcctgcaggtcgccgagggtgacaggcatccccagcgtggccataccctgcgccagacgctcggccagcggcccgcgataaaagctgtcgagaccgtcgctggccagcatgcgcagggtaccggcgagggcgggctggcggaagcggctgccgggccgcggggcctcgcccgcgaccagccaggtttcgctgaagcccggctgatggcgcagctcttccagtttgctggcggtggcgtgggcctgcgaggcagtgaccggaatgccggcttcggcatagccgatcgcatcggccaacaggcgggccaccggcagcgcgcggccggttaagtcccgtgaaatacgcagcgcctcgtcccagccgctgacggtgccggcgacggtcagcgcggcctgcggtccccggtggggaatatgccgctgtccggcgtaggcctcgagggtcgccagcgatccggcggccccgctggcgtcaatggcgatggggtctccctcaggcggcacgatcagccagaagccatcgccgccgaggccattcatatggggatagacgacggcgatggccgccgcggcagccaccatcgcttcaatggcgctgccgccctcgcgcaggatcgccagcgcgctctgactggcgaggtggtggggggccaccgccatgccgtgggtcgaaacgttgctactgtgcataaattatcctttctgaacgaatcacccgcagaacactgcaaaagctgttccatctctgaacgtttcgtttcattgataaaaacgatgaccagaattttcccactggcacgctatgtgtaaggcatagcagatacagtatgatgaggaatggatgatgaaacgaaagttacagggggcgctatgcaacaactcgatgaacgactgaaagggcaatacgcctcgctgtcgccgcaggagcagcgggtggcggatttcatctttgaccactttgacgacctgataagctacaacagcgccgagctggcgcagctgagcggcgtgtcgaaagccaccgtcagccggctgtttaagcgcctcggttacgacaaatataaggatatgcgcgatgaactgcgcactctgcgtcagagcgggatgccgctcaccgaccagcgcgacgcggtgcagggtaacacgctgctggcgcgccattataagcaggagatggcaaacctcacccagtgggtcaacgccctcgacgcccgccagttcgctgaggcgctgacggcgatggtggccgcccgccgcattgtggtgattggcatgcgcaacgcctatccggcggcgctgcatctgcgccagcagctgctgcaggcccgcggccaggtgctggtgctgccccagccgggtcagagtctcagcgaagagctggtcgatctgaccgccgatgatctggtggtaatgatggcgtttcgccgccggccgcgaatagtacgcccgctgctgcagcagctgcagcgcgacggggtgccggtcctgttaatgtgcgagccgcaggcccacagcctgtttccgctctcccgctggcagctctgcgcgccgctggacagcgtctccgcctacgatagctatgcctcggtcaacagcctgattaatctgctggccaatgcctttctccatgaaacgctcgacagcggtcgtccgcgcatccacgatatcgcctcgctttaccagcagctggatgagctggaacaacgctgatggggcgccagcgtggtgctgtgcattattatggtgcaataaaaaccacgtgatggcgccgccgctctctgaacccttttccgttaacgcttgtcctttctcactttttgttttaattcctcgccaaccctcgcctcgtctgtatctggcacattagttgcaaaaacagattcaaagaatcttttgtttcatgctaacgtaacgggtaaacatcatgaagaaactgttgatcgcgctggccggggccgcttgtctcctatcgtctgtttctgccgcgcaggctgaccagctccaggatattgaaaaacgcggagtcattcgtattgccgtgcctcaggattttccgccgttcggctcggtgggcaccgacctgcagccgcaggggtatgacatcgatatggcgcgctatctggcgaaatcgatgaagctcaagctgcagctggtcccggtgaccagcgccaaccgcgtgccgtatctgcagaccgataaggtggacctggtgatctccagcctcggcaagaacgccgagcgcgagaaggtgatcgacttcagccgcgcctacgccccgttcttcctcggcgtgtttggctcgaaaggggcggaactgaaggacgcggccgcgctgagcggcaaaagcatcggggtgacccgcggggcggtggaagatatggtactgaccagcgtggcgccgcaggcggcgcagattaagcgctacgaggataataacactacgctgtcggcttacctgtccggtcaggtgcagtatgtcgccaccggcaatctggtggtggcggccatctcccggcagaacgccgacaaagcgccggtgccgagctttatgctgaaggactcgccgtgctttatcggtctgaaaaagaacgaaccggcgctgaaggcgaaagtggataccctcattgagcagggcattaaggacggcaccctcaacggtctgtctgagaagtggctgaaagcgccactgcctgccagcctcggcgcgtaaggtctggggatgacggagcaacttcatttctctgagctctggccgcactggccggagctgctggccggcctgtgggtgacggtgcagttgacggtgctggcgacgatcggcggactggcgatcggcatcctcggggcggcgatccgcagcggtcgcccgggaatgctcagccgggtatggggcggatatgtggaaatcatccgtaatacgccgtttgtggtgcagctcttttttatcgtctttggtttaccgaacctcggactgaagatgaccgccggtgaagcggcgctgctggcgatggtggtcaacctcggcgcatatagcaccgagatcgtccgcgccggcatccaggtgacgccgaagggccagtgggaagccggtcgcgtgctcgggctcagccggacgcaaaccttcgttcgcgtcgtactgcccccggcgctgcagaggatttatccggcgctggtcagccagtgcatcattgtgatgctcggctcgtcagtggtgtcccaggtctcctatgaggagctgaccttcgccgccaacctgatccagtcgcggacatttttgagctttgaggtctatctggtaaccaccgggatctacttagcgttatcgatagcgatgcgccagctgctgatggcggcggggcgtaaatggctgggggtacaggcctgatgaccacttttaccgactgggacattatccgcaacctgctgctggccggtcgctggacggtgctgctgtcgctggtcgcgtttaccggcggggcgctggtgaccttaccgttactgctgctgcgcctcaccggcggacgccaggtgaaacggctgatccgcgggtatattgagctgttccagggcacgccgctgctgatgcagctgtttctggcattctttggcgtggcgctgttcggcgtcgacgtctcggcgtggaccgccgcctcggtcgccctgacgctctacaccagcgcctttctgctggatatctggttcggcagcattcgcgcgctgccgaaaggccagtgggaagcctcgcgctgtctcgggctgagcttcggccagaccctgtaccgggtggtggcgccgcaggcgctgcgcattgccatcgcgccgaccgtcgggttcgccgtacaggtgatcaaaggcacggcgctggcatcgattatcggctttgtggagctgaccaaggccgggacgatgctgaccaacgtcacttatcagccgtttaaagtgtttgcccttgtggcgctgggctatttcattctgtgctatccgctgtcccgctacagccgctatctggagaacaaattcaatgcctctcatcaccattaatcagatgcagaagtactacggcgacaaccatgtgttgaagggcgtcgatctggatatcgacatgggggaagtgatctcgatcatcggccgcagcggctcgggtaaaagcaccctgctgcgctgtatcaatggtctggagggctaccaggagggaagcatcaagctcgggggcatgaccatcaccaaccgcgattcacaggcccgggagatcagccgctccatcggcatggtgttccagaactttaacctgttcccgcacatgacggcgctggagaacgtcatgctggctccgcggcgggtactgaagaagtcccaggccgaatgccgggagctggcgcagcggatgctggagaaggtcgggctcggcgaccgtctggattactacccggccaacctctccggcggccaacagcagcgcgtggccattgcccgggcgctggccatgtcgccgaaagttttactctgtgacgaaatcacctcggcgctcgacccggaactggtgggtgaagtgctgaaggtgctggagcaactggcggcggaaggtatgacgctgatcctcgtcacccatgaaatgaattttgcccgcgaagtgggcgaccgcgtggtgtttatgcatcagggacgcgtctgggagcagggcgacagcaaaacgctgttcgccagcccgcagaccagcgaactgaaacagtttatctcctcggtgcgcggtcttaactaacgtaaggaatggcagatggatatcactcagttttcgcaaattaacccgccgcagcgcctgctgatggggccggggccgatcaatgccgacccgcgcgtgctgcgcgccatgtcgagccagctggttggccagtacgatccggcgatgacccactacatgaatgaagtcatggcgctgtaccgcggcgtgtttcgcaccgaaaatcgctggacgatgctggtcgacggcacctcgcgcgccgggatcgaagcgattctgctgtcggcgatccgtcccggtgacaaggtgctggtgccggtgttcggccggtttggtcatctgctgtgcgagatcgcgcgtcgctgccgggcagaagtgcacaccatcgaggtgccgtggggcgaggtctttaaaccggatcaggttgaggatgcgatcaagcgcgtgcggccgcgcctgctgctcaccgtgcagggcgatacctccaccaccatgctgcagccgctggcggagctgggagagatttgccgtcgtcacgatgtgctgttctataccgacgccaccgcgtcgctcggcggtaacccgctggaaaccgacgcctggcagctggacgccgtgtccgccgggatgcagaagtgtctgggcggtccttccggcacctcgcccatcaccctcagcccgcggatggaagaggtcatccgccgccgccgctgcattgagcaggggatccgcaccgatgcccatcacgatggcgtcgacgagatgatctactccaactatttcgatctcggcatggtgatggattactgggggccggagcgccttaaccaccataccgaagcgacctcggcgctgttcgccgcccgggagtgcgcgcgcctgatcctccaggagggactcgacaacggcatcgcccgccacaaactgcacggcgatgcgctgctgaagggcatccaggcgatggggctcgagacctttggcgatctgcggcacaaaatgaataacgtgctgggggtggtgatccccaacggggtcaacggcgatcaggtccgcaaactgatgctggaagatttcggcattgaaattggcacctcgtttggtccgctgcacggtaaagtctggcgcattggcaccatgggctataacgcgcgtaaagactgcgtgatgcagacgctcagcgcgctggaagcggtcctgaactacctcaggttcaccaccactcagggcgcggcgatgcaggcggcctgggatcactaccgcaccgaggccaccctatgagtgacaccgtccgccagcaggcggagagagaggcggccgccagccgggtgatggcgcgcgccgaccagctggccgccctcagcgaaaccgccgacgccctgacccgggtctatctgtcgccggaacatctgcaggccaaccagctggtgggccagtggatgcaggccgccggcatgatggtatggcaggacagcgtcggcaacatctgcggtcgctatgaaggcgtgcaggagggcgcgccggcggtgctgctgggctctcatctcgacaccgtgcgcaacgccgggcgctacgacggcatgctcggcgtactggcggcgattgaggtggtccagcgtctgcaccagcaggggcgacggctggcgaaggcaatcgagatcgtcggctttggcgatgaagagggcacccgctttggcatcaccctgctcggcagtcgcggcgtcaccggcacctggcctgaaagctggctgtcacagtgcgataccgacggggtgagcgtcgcccaggcgctggtgaatgccggactcgatccggcgcggatcgcccacgcggcccgtcacccgcgggatatcgccgcctatctggaaccgggcccgcaccccccaccaccgccgcggccgcccccccccgggcg

SEQ ID NO: 204 - DNA, 12306 bp, Unknown
  source: /note="Description of Unknown: MKP2_2161_1 Mutant Bacteria sequence"
gcagaaaaatggccatccgctgaatgcgcgagccgagcatcagcggcagggccagcagcgacaggctgaaaaccaccgcgcagctcagatgcacgcggcgaatcccgacccggtcggccagccagccgagcggggtctggaacatcgcatctccggtcagcaccacggtgaccagcagcaccgccagcccttcattcagccctttgtccatgccgtacagcggcagcagggcgaggatgctggcgtcaaagaaggcgaagcagaagaccccggaggccagtaccggcagaaaggcgccgaggctgcgccagctggcgcgctccccgaggctttcacgagtgccggtgggcagatggcgcagcatcagcaggcagacggcggtgaccgcgacaatcgcgatcagcgctgatgtctgccaggcggggccgacggagatcagcagcggcccggccagctggcagccggtaaaggccgaggcgtagagaccggtgagggtagcgcgctggctgcccgccgcgccgccggtgatccagctttcgccgagtacgataatgaccccggaggccaggccggtcagcaggcgcggcagcaaaagcagcgtcatatcggtagtcatgcatgaggcgatggtcgccagcgccagcaggatcagactgccgctcagcagcacgcccatttcaatgcgccggcacagcgcaggagagaggaaagaggagatcatcatgccggcgggcggcagagcggccagcaggccgacgtacagcggcgcgatctgctgctgcgccagctcaagactgattaacggcaccgtatagccggtgataaatcccacaagcgacgcggccatgatcatcgccagcgtgggggcaagacgattctggtctgggttaaacattttatttccgatgacggagaggtcagtagtggatccttcggcaaattgccgtcctgagttgcataataattaatcgactggccgttgtcaccgttgaaatcactaccaaaaaagggccgcagggcggcaggtgggctgtacgccgcgccgccgccgcatttcgtgacgttgtcagcgtggtaacgacaggatataacggagggagcggcagcgccccgacgccggtgagcgacggggaaaaacgcgacgcatgaccgattattcagcattacgctatgcaggaaaggagtaatacatggccgtatcgccgtcactgatcgccgaagccgttggctggcgacgtgaatttcacgccgcgcctgagctcggatatcaggaacaggagacctcgcgccgcgttgcggagctactggcctcgtttgggctgcaggtgcatcgcgggctggccggcaccggcgtcgtggcgacgctggagaacggccccgggccggttatcggcctgcgcgccgatatggacgccctgccaatcaccgagctggggagcgtcagctaccgttcacgccgtcccggggtgatgcacgcctgcggccacgatggccataccgcgatgctgctggcggccgccgcccatctggcgcagacccgccatttcagcggcaccgtccactttgtctttcagccggcggaagagaacctcggcggtgcgcgcaaaatggtggaggaggggttgtttgagcgcttcccgatggacgccatctacgcgctgcataactggccggggatccctcttggcgaagtggcgctcagcgatggcgcgatgatggcctcgctggacgccttcgagatcaccctgcgcggaaagagctgtcatgcggcgatgccggagagcggggccgatccgatcgtcgcggcggcgcaactgataatggcgctgcagaccattccttcccgccgcttgtcgccgcaggattccgcggtggtcagcatcacccagataaacggcggcgaggcgatcaacgtcctgccggacaccgtggtgctgcgcggtaccttccgctgtctgagcaatcgcgttcgcgcccgcgtgcgggagctcatcgaaagctatgtggcgacccagccgcaggtgtccgatgtgcagggcgagattagctggttcccgggttatccggtgaccaaaaaccatgcgctgcaggcgcagcaggtgcgcgaggtggccgtcgccactctcggcgcgcaagcggtgcgctggaatcaggcgccgtcgatggcctccgaagattttgcctgcatgctggaggcctgtccgggggcctatttctggataggcaccgacggcgaaaccccgtcgaagccgctgcataacgccagctatgactttaacgatgcgctgatcggccccggcgtcgccatgtgggtggggctggtggagaaacagctgccggcggcgtaacccaccggcagcggcagagggagcgcgctgcgctccctgaggtcagacgtcggcagcggctttcagtcgcgctttcatgtcgctgtaggccgtccaggcatagcgctccgcccattgctggtcggcaatcgcttccactttcaccgcacagtatttggtttccggcgttttggagatcggatcgaggttatcctgggtcagctcattgcaggcgcccacccaccactgataggtcatatagaccgcccccggattgatgcgatcgctgaggtcggcgcgggagatcaccttcccgcgccgggagctgacccacaccagctgtttgtcggtgatccccagtcgttgcgcatccgcaggattcatctgcacccgtcccggctcgtcagccagcgactgcagcgcggcgcagttgccggtcatcgagcggcaggaataatgcccgacttcccgcacggtgcagagcaccagcggccactcgtcatccgggcgctccgccggcgcgcgccaggcggtggcgaacagctgccctttacccgagggggtgtcgaagcggttgtcttgatacagccacggcgtgccgggatgatcgagggtcgggcacggccactggacatggcccatatcgcccattttctcccaggtcacgccgtagaacagcgggcagagctcgcgcatctcgtcccagatctgctggttgttctcatagtgcatcggatagcccaattcgctggccagcaggctgatgatctcccagtcgcgcttcacattccccgccggagggatcgcctgttcaaaccgctggaacccgcggtcggcgcaggtgaagacgccgccgtgctcgccccaggaggtggccggcagcaggacatcggccatttccgctgttttggtcatgaagatgtcctgcacgacgacaaagtccagcgcctcgatgcctttgcgcaccaggccgaggtcggcttcggtctgcagcggatcttcgcccataatataataggctttgatctcgccggtcagcgctttatgcggcacctcggtgatgcgggtgccgacctggtcgtccatcagcgccgggtcgatgccccaggcggcggcgaatttcgcccgcacggcggggtcggtgacctcctgatagccgggaaacaggttcggcagcacgcccatatcgcaggcgccctgtacgttgttttgcccgcggaccggccccacgccgacgttgggccgtcccaggttgccggtgagcagcgccaggcttgccaggccgcgcaccacgtccaccgcctggccaaactgagtgacccccatgccccacatgatggtggcggatggggcggcggcgaacatgcgcatcgcctcccggatttcccgcgcgctgaccccgacaatcccttccaccgcttccggggcgtaatccttcaccgcctcgcggtaagcatccagcccttcggtatagcgttcgacataggttttgttgtacagctcctcctccagcagcacatagccgaaggcatttaccagcgccatgttgctgccgttgttgagctgcagatgacgatcggcaatgcgcgcggtttcaatgcgccgcggatcgcagacaatgattttggcgccgttgtcccgggccttgattacccggcgggcgacgatgggatgggagtcggcgcagttgtagccaaaaaccagcaggcacttcgagttttcgatgtcgctaatcgagttgctcatcgccccgttgcccagcgcctgctgtagcccggcgacggaggggccgtggcagacgcgggcgcagcagtcgacgttattggtgttcagcaccgcgcgggcgaacttttgcatcacatagttggtttcgttgccggtgccgcgcgaggagccggtggtcatgatggcacgtgggccatgcttctctttgatctccctgagcttgctggcggtatagcgaatcgcctcctgccagctgaccggcgtgaaggcgccgcctttctggtagcggatcatcggttgtttaagacggggcgtcaggagctgcgtatcgttaagaaaatcccagccgtagtagcctttcaggcacagctggttctggttggtgacgccgtcggcggcctccgcgcgaatgattttattgttgtcgacaaccagtttaagtttgcaacccgccccgcagtaggggcacacgctcgtgatttttttcatcagtaacagacctgttaacagtgaactgaggatcgctgtcgcgccgggcccgacgggcaacgatcgcggtatcgcctggtggtgatgcagacgcaggcctgttgcgctatgcaggtcttgtgccagaatttaaactcttgatctgtattgaaaaatgaaaagagattgatgacgggagcatgacctcgtcactaatgacgatgacgcagagcgccgacgtcagacgctctgcgggagtaaaacgcggctaggcgagagggcggcagcggtcgaagtgcgattcgctcaggccgacgtcgcgcgcggcggcgcagatagcctgccagctgccggcatccagcgggatcccctgcgccagccgcgcttcgcggttggcggcctcccattcgccgggcgccagcaccggggcatcggcatcgtgcggcgactgcttacaccatgcgataaaggcctccgtctgcgcctggctgtccggggcatcgaacgcgtccgggcgcaggatcaccgtggtcatgcagttaaagatggcgtcgacgctggtctgcaggctctcctgatgggtggtttgcccgccggagagcgcgccgccgagcacttcgcacagcgtcgccagggcatagcctttgtgctgggcgaaggtgagcagggcgcccagcggcgaggtctgcatcaccgccgggtcggtagtgggtcgaccctcggcgtcaatcaggcagccgggggccacggcttcgcctttatgccaggcgacgcgggttttaccaaaggcgatggcgctggtggcgtagtccagcagcagcggcggatggcccgcgcggggaaacaccacgcacagcgggttggtgccgaagcggctgtccttcccgcggaacggggcgaccatcgggtcgccgatgacgctgacgaagtgaatggagatcagcccggcggcggcgcactgttcggcccagtagccgatgcgtccgacgtgatgcgcattgcgcagggcgatagccgccataccgtgctgcttcgccttttcaatgcctaactgcatcgcttcgtgggcgaccacctggccgaagccggcgttgccgtcgagggtgaccacggcgccggcgtctttggtcaccgtggcgtggcggttgagctgcagaaaaccaccggcgtgggatttgacgtagctggggatcatcccgacgccgtgggagtcatgcccggcaagattggcggcgatcagatggtccgcgacgagggtggcttcccctggggtactgccgagatgggtaaacagtgagacgacaaactgatgcagatccgtcgccagaaagcggtgtcctgtaggcactgattctctcctgtagtctgttgttattttgttatgtttgccgttttatgctgcgccgcccggcgcagaaggtcaagggcggcgtctcccggcgacatgccgctgcgccagcgcctgcgtatacgacacacgataaaaaaccgggccgggatcgcgttttaattaacgccataaacaccacatttttaaattctgccagtgtcacaaaagccagaaaaaagccatccccgtcgttgcaaggggagctgataccactatatgttaaatttgtgtttattaattgatgattaaaggttggtatcatgtataagaaaataagtggtttagtggtttcactgacggccgttttcgcctgtgccgcctgggcggaggtgcctgcgggctatcccgcggattatcaaaaaacgattgatgccgccgtaaaagagggcaaggtggtggtctattccacgaccgataccaaagcggccgggccgttaattaagggatttgaagcgcaatacccaggcgtcaaagtcgaatataacgacatgaacagtaccgagctgtataaccgctatatcagcgaacaggccgccgggggcggcagcggggatgtggtgtggagctcatcgatggataccgcgctgaaattagccaccgaatacgcggaacaatatgcctcgccggaggtgaagcaattacccgactgggcggtctggcagcaaaaagcctatggcactacctatgagccggtggtgtttatctataacaaacggctgatcccgcagaatgaggttccggattcgcataccgcgctggcaaaacttatcgccagccaggccgataaatttaaaggcaaagtcaccacctacgatatcgaaaaatcgggcctcggctttatgctggcggtacaggacagccaggccgacgcgaactattttgccgacctggcgaatatcgccaaaggcggcctgacggtgcagtcttccaccggcacaatgatggagcgcgtctcctccggcgaaaacctgatcggctataacattcttggctcttatgccgaagcgcgggcgaaaaacgatccctctttaggtattgcctatccgaaagattacgtgctggtgctctcccgcgtctcgtttattagccaggagagcgaacatcccaatgcggcaaaattgtggctcgactatgtcttgtcggaaaaaggccagcagatcctcgccagccaggcggatattccctcaattcgtcgcgatattgcaggtaaaaatgatatcgatggtatgaccgcgctgctgggcaaagcgttaaaaccgatcccggtcaacgaaacgctgctcgattatttacagccgcaaaaacgtctgcagtttattaaacaatggcgcagcgccgccgcgaaataatcctcctcaggggcatcgccgatgcccctattcacacccggcgggtttattcacctgaccgaagggatgaaccatgaacgtattacgcagaaagtggcaggggctgccgcgcggcgtggtggtgtgcatcacggcgctggtgatttatgtcccgctgttatttattgtggtgcagagttttctttcggcaccgttcttttcccgctccaaatcgtggagtctggaagccttcgcctttatttttaccgacccggatttttatctggcattaaggtcaggttttattctggcctttggcctggtgattatcgccattccgctgggcggtattttggcgtttctgatggtgcgcaccgatttacccggccggcggatcattgagccgctgattttggtgccgatcttcgtctcgccgatggtgctgggctttggctacgtggtggccgccgggccggtaggcttcttttcccagtgggcgcagcagctgatcggctttgtgccgtggaatatctactcgatgttcagcattgtggtcatcgccggcttaactcacgttccgcatgcctatctctatatctcttcggcgctgcgcagcgtcggctccgacgtggaagaggcggcgcgcaccgtcggcgccacgccgctgcaggtgatgacctcggtgagtctgccgatggtgcggccatccattctttacgcctgcgtgttgctctttttcctcggtctggaagtcttcggtctgatgctggtgctgggcgaccccgagggcaacatggtgctggcgacctatctctacaagctgactaacaagctcggcaccccctcctaccatctgatggcggcggtggcggtagtgctgatctgcatcaccatcccgctggtgatgctccagcggcggctgatgcgcaccgccaaccgctttgtcaccatgaagggcaaggcgtcccaggcgcgggcgctgccgctgggcaaatggcgctgggtcgccggggcggtggtagtggcctggctgacggtgaccatcggcgtaccgctgctcggcgtggcgctgcgcgcttttatctccaactggggcgtcggcgtgtcgctgtgggatgagctgtcgctggcgacgttccacaatatctggcagcagcccaacctgctgcgggcgatcgtcaactcgatggctatcggcatcatcggcggcgcgctggcggtgatctgctatctgtttgtcggcatcgccatgcaccgcaaagcggacaacgtcacccgctttctcgactacagcgtgctggtcccgcgcgctgtaccggggctgctggccgggctggcattcctgtgggtattcctgtttgtgccgatgtggctcgatcagtcgctgaagcacggctggctctcggcgctgccggtggccgactggctgcgggagcaccttatcgtgcagctgcgcgccctgcgcaacaccatcttcagcgtctggctggcctacaccgtggtgtggatggcctacggcctgcggctcatctcctcgacgctgctgcaggtgggcccggagctggaggaggcggcgcgtagcaccggcgcctcgcgggggcagatcacccgccacgtgaccgttccgctgtcgcgctatgggctgattggctcctggctgctgatgttcctgatctttgagcgcgagtattccaccggcgtctatctgctgtcgccgggtaccgaaaccatcggctcgatgctggtgtcgctgtgggcggcgggggccatcgatatcgtcgcggcgctctcctttatcaatattctgctggtggtgattggcctgggtatcgccctgcgctttggagtgaaattacatgattgagttatcggtagaaaatctgcatctcacctatggcgacaacccggtgctgaagggggtttccatgacgcttggccggggagaggtggtgtcgttgctggggccttcgggaagtgggaaaaccacgctactgcgggcggtggccgggctggaaaaaccgacgagcggacggatcgccatcggcaaccgcacggtgtacgacggcacgccgcgcagcgagatcccggccgaagagcgtaacctcggcctggtgttccagtcctatgccctgtggccgcacaaaacggtgttcgacaatgtggcctatccgctgaagctgcgtaaagtggccgccggggagataaaagagcgggtgcagcgtgtgctggatcagctggggctggggcaccttggcaaccgccttccgcaccagctctccggtggccagcagcagcgggtggccatcggtcgggcgctggtttacaacccgccggtgatcctgctggatgaaccgctctccaaccttgacgccaagctgcgcgaagaggcgcgggtgtttctgcgcgagctgatcattaagctgggcctgtcggcgctgatggtcacccacgatcagaatgaagcaatggccatctccgatcgtattctgctgctgaacaatggcgtcattgagcaacaggggacgccgcaggagatgtacggcagcccggcgacgctgttcgccgccgagtttatgggcagcaataaccgtctgcacggtaaggtgacggcgctggaaaacggtcgtgcgagggttgaaggcgccagctggacgctgtgggggcgagcgggcgagggggtcagcgtcggcgagccggcgacggcggtgatccgcgtcgagcgcctgcgactcgacggcgcagcgcaggataacagcctccagctaccgctgctgaccagcatgtacctcggcgaccgctgggagtacctgttccgtaccgaaggcgacgactttccgctgcgcgcctacggaacggcgctgcgcgatgccgaacactgccatctgacgctcccggcggaggatgtgtggatttttccgcagcggtagccgcccgttaccccgccagatggcacacggcttcaatattgtgcccgtctggcgcaatcacaaacgcggcgtagtaactggcgtggtagtttggccgtagccccggcgcaccgttgtcctttcctccggcggccagcgctgcctgccagaaggcatcgacctgctcgcggctgtcggcgcgaaaggcaatgtgcagcggcgccggtttttccgcactttgatagaggcatagagaagcatcgccgctgccggccagctctgcgccgtagctcggttcgccttcgccaaccaacgttacgccaagcggggccagggcctgcaaaaagaacgctttgctggcggcatagtcgctaacgccgaatttcacatgatcgaacatatcttctcttctcctgtggatgggatatcgccagctgaaggcgctagccggacaatagatacaagatagttaacaacggttattaacttttttaacagctcaaaatgtttaattattcctaatacgagtatttacagacgtttaatctgccatgtaccataaacaaaaaataacatttgtgatacaagtcactcttttttggcgcatgggtaagctcagcgcggtgtgaatgccgctggtttaccgcctcaaggttatggcagcactcttctcacgatgacagaccggtgaatttctctccgatttcccgcgtttcgttgagaatcgtctactatccaaacgataaccctataaatgatatcgcctctggcgatgttttatccgacttgccgggccgggccagacgctaagcggtttaaaagcgcaatggtatcggttccagcacgacattcactggttttgtcagcgacaaaaacagtaattttcaatgacaggaatgtgatgatgtcgagcgagaaaaccaacaattccaggcgtgatttcctggtgaaatcgatggcgctgatcccgacggtggtgatcggcggcgcgggagcaggggctattggcgtggccaccagcgcgaccgcgcaggcggcccccgcttcagagccagcctccgggaacaccgcggcggccagcgactggaagccgcagttcttcaacgatcgtgagtgggcgtttatcaacgccgccgtcgctcgcttaatcccggcggatgaactcggtcccggcgccaaagaggccggcgtgccggagtttatcgaccgccagctcaataccccttacgccaccggctccatctggtatatgcaggggcccttcaatcccgacgtgccgaaagagatgggttatcagctgccgctggtgcccaaacagatctataacctcgggatcgccgacgccgaggcgtggtgtcaggacaaatatcataaaaccttcgctgaactgagcagcgagcaacaggacgaggcgctcggcctgtgggaatcgggtaaagccgagttcaaacagctgccggcctcgctgttcttcacctatctgctgcaaaacacccgcgaagggttcttcagcgacccgatccatggcggcaataaaggcatggtcggctggacgctgattaattttcccggcgcgcgcgccgactttatggactgggttgaacggggcgaacgctaccccttcccgccggtatcaattaatggggagagggcgtaatcatggccaccgtattgaaaaaaaccgatgtcgcgatcgtcggcttcggctgggttggggcgatcatggccaaagagctgaccgaagcggggctcaacgtcgtcgcgctggagcgcggcccgatgcgcgacacctggccggacggcgcctacccgcaggtgattgatgagctgacctacaacatccgccgcaagctgttccaggatctgtcgaaaagcaccgtcaccatccggcataacaccagccaacaggcggtgccctatcgccagctggcggccttcctgccgggtaccggcgtgggcggcgccgggctgcactggtccggcgtccatttccgcgtcgatcccattgagctgcggatgcgcagccactatgaagaacgctacggcaaaaacttcatcccccaggatatgatcatccaggatttcggcgtcacctacgacgagctggaaccgttcttcgataaagcggaaaaagtattcggtacttccgggaccgcctggtc

SEQ ID NO: 205 - DNA, 11839 bp, Unknown
  source: /note="Description of Unknown: MKP2_2161_1 Mutant Bacteria sequence"
cggcgcctgtatgcacaggtgcttcacggcggcccggccccaccggacgcacccccaccgcgcccgcagggagcgtcagatggttataacagaccggcgccacggcgcctgattccaggtggtgccctccgtcaggctgacggtggcgatcatcgacccgcccccttcccaaggcgccatcgtctgcagcagctcggaccgggcgtagagcacgccgatcccggtcggcccatacagcttgtgggcggagaaaacataaaaatcgcagcccagcgcctggacgtccaccgggtggtgcatcaccgcctgggcgccatccaccagcactttcgcgccatgctgatgcgcaagagcaatcagcgccgccagcgggttttccgtccccagcacgttggagacctcggttatcgccagcaggcgggtgcgcgggtcaaacagtcccgggacaacatccagttgcagcgtaccgtccgggttcagggggatcacccgcagctcagccccgacgcgggcgcagagcatctgccacggcacaatattggcgtggtgctccatttcgctgatgatgatgttatccccggcgccgacgttggcgtttccccagctgttggccaccaggttgataccctcggtggtgccgcggacgaacaccacttcctccgccgatccggcgttaaggaaggtggccgcctgctgacgcacggcttccatccgcgcggtggcttccgcgctgagggtatggatgccgcggtgcaccgccgcgtagccgtggcgatagaattccgcttctgcgccgatcactgcctccggcttctgggcgctggcggcgctgtcgagatagaccagcggctgaccgttgacctcccggttcagtaccggaaaatcggcgcgaacctgttctactgaaaatgtcatactgtgcctcccggcaaacgctgtccaatacgcgccagcacctgctctctgagcgcgtcgctgcggatagcctcggtgagctcggcggcgaaggcgtagaggatcatctgctgcgccgcctgctgttcgataccgcgcgagcgcagatagaacagctgctcttcgtcaatgcgccccaccgtcgccccgtggctgcatttcacgtcatcggcgtaaatttccagctgcggtttggtgtcgacctccgccagccgcccgagcagcagattattgttggtcatctgaccgtcggttttcagcgcgagcggcgcgacgttgatcagcccgttaaacaccgcccgccccttatcgctgacgatggttttgtgcagctggcggctggtgcagtagccgacctgatggtcgagccaggtgcggctatcgcagacctcatttttcaccggcatcgccagcgaattgaggcgcaggttgctgttttcgccgcccaggcgggtgctggtctggtgacgcagcacctggccgccaagcaggaaactgctgctgaaggccgaggcgtcgcggcccagcagcaggtcgttatgggcgaagtgatagctgcgggcattctcaaatgccagcttgatatgctggaggtgcgcgttatcggccaccgtcatggtcaatcgcccgccggtgaaatgcggctgctcattgaggctcaggtaatgctcgacaatcgtcgcctccgccccgctctccagcgccaggtgatggcgatagtgggcggtattcagcgcatcgccggccaggccactggtgatatgcatcagcagcagcggtttatccaggcggcggttgcgcggcacgcgaatgcgggtcaccgtctgggccaggctttcggtcagatggagaaacacctccggctgcagggcatccggcagatgctggcgctgattatcgacactgacctccacgccgctggcggcaagatcgtcgctcagctgaggatgatagcggccatcgataaacaccagccgccaggcgtccagcggcagcgccagcgcatcacgctgttcagcactgagagaggccccctcatcggcgacaaagcgaccgttaagtagggcatccagcggagtgtatttccagtcctcgtgcttgcgcgtcggcagcccaaggcgcagcagctgctgcagatgctgactggcctccggggtacgcgggccgccctgcgcttcaaacagatggtgccactgctgcagcgcgttactgctgttcggtaagccagccatagccctgctcctccagctgtttgaccagagagaaatcgcccgacttcacaatccgcccctgatacagcacatggacatagtccggcttgatatagtcaaggatgcgctgatagtgggtgacaatgataaaggcgcgtttgccgtcgcgcagggcattcactccctgcgagacgattttcagggcatcgatatccaaccccgaatccgattcatcgagaatgcacagctccggctcaagcaccgccatttgcagaatatcgttgcgctttttctcaccgccggagaagccaacgttcaccgagcgggtcaggagatcttccggcatctgcagcagcttgatcttttcttccattaagtcctggaaatcgaaacgatccagcgcctcctggccacgatagttgcgcacggcattcagcgcagtctgcaggaaaaactggttgctgacgccggggatctctaccggatactggaaggccataaagataccttccccggcgcgatcttccgcagcgagttcgagcaggtttttgcccttaaattcgacgcgaccgccagtcacctcataatcttcacgcccggccagggtggccgaaagcgtacttttgcctgagccgttcggccccataatggcgtggacctctcccgggcgcacctctaggttcagcccgcgcaggatcgctttatcttcgacggcgacgtgtaaatcttgaatacttaacatcttttttccttaattatcagccgacgctatgttcaaggctaatggccagcaatttttgcgcctctacagcgaactccagcggcagctcggagaagacgtctttacagaaaccgttgacgatcatcgagatggcatcgtcttcgctgatcccgcgctgcaggcagtagaacaattgatcttcgccaatccgcgaggtggtcgcctcgtgctccagctgggcgctgttgttgcggcattcaacatacgggaaggtatgcgccccgcagtccgggccgatcagcatcgaatcgcactgggtatagttgcgggcgttggtggcggtcggcatgattttgaccagcccgcgatagctgttctgactgtgtccggcggagatccctttcgagatgatggtcgagcgggtgttcttgccgatatggatcattttggtgccggtgtccgcctgctgatggccgctggtcagcgccaccgaaaagaattcgccgatcgagttatcgccgcgcaggatgcagctggggtatttccaggtgatggccgagccggtttccgactgggtccatgacattttgctgttctccccttcacacagggcgcgcttggtgacgaagttgaggatcccgccggtgttgttatcgccggggaaccagttctgcaccgtggagtatttcacttccgcgtctttatggatgatgacttcaacgaccgcggcatgcagctgatagctgtcgcgcaccggcgccgagcagccttcaatatagctgacgtagctgccttcatcggccaccagaatggtgcgttcaaactgcccggtcttttcggcgttgatgcggaaataggtcgacagctccatcgggcagcggacgcccttcggcacatagataaaggtgccgtccgaagccaccgcggcgttcagcgcggcaaagaagttgtcattccccggcactacggtgcccagatactttttcaccagttccggatggtcgtggatcgcctcgccgaaagaacagaagatgatcccctgctcggccagcttttctcggtaggtggtcgccaccgacaccgagtcaaatatcgcgtccaccgccacctcgcgcccttcgcgtaccggcacgcccagctggttaaaggcttcttccacctcgctggtcagaaaggtattggccccggtctgctgcaccgcgccaggctcggagtcgcaggtctcatcgcagttgccgcaggagggcgcggaatagtagctgtaatcctgataattcagcttatcgtaatgcgctttcagccagtgcggctcctccatttccagccacgcccggtaggcattcagacgaaactccaacatccactgcggctcattgcggcgagccgagatagcccgaacgacttcttcattaatgcctttggccagctcatcggtttgcaggcgagtaaaaaagccctctttgtagttgagcgggccgccggtccaggttttgacatcgtcagttgcttcagtattacgcgacatagttactccgcctgcaccccaaaactttcgccgcagccgcactcatgctgcgctttcgggttatgaaatttaaagatttcatttaaaccttcccggacataatccagctcggtgccgtcgatgaacggcatcgcctgcagcggcgcaaacagcttcgccccgtcagattcaaagagcagatcgtcgggcgccggctcggcaatcatttcgagcacatagccaaaaccagcgcagccgctggttttaatgcccagccgcagccctttcttatccggctgcttgcgcatcagatcgcgaatatgcgcggcagcggccggcgtcatggtcagtccctgccagctgaaatcggcgggattaaaagttcctgcttgtacttccatcgatagacctccaggttggcgccatcaaggcataccgccatgttagtgataatgattatcacttcaacccttctgcagcaggggtattgcctcatttagtgctttttataagcatagaccctcgcccggggattatcagggcgtgcaaatagaacttaatcgattgatttataatatgttattttgaaatcattctatctccgcacgcaatggcaaagatgtatcgaaaataccgatttatgcaatagcggcagaccaccttgctggttatcctttgcagacgagcataaagtgacaacgtaacagaaagaccatgccagcgcggggcgcggccccggccatgcgctagcaaaaagcgggtagtgaaagcgcccgccggtaacgcttcaggaaaggaataagcgccgctcgcctggccgcgttcgggaaataaaaaccaaaataaaacgggcaaacggggctgccaggcgggataccggctggctaggtgcctttactcaccagccgggcggcctggacaaagacctcatcctctaccccgtcccccttctgtctgcccagcctcaccagttcatccacgatactcccctgattaatctgcttttgggtcgccactaagctaatgaccgccgcgccgatggccatgccaatcaatgccgtttgttcatctttatctttcatggtgtcgctccgtctgtcctcctcagaaaggctagcaaaagataccatctgctcaatttcaaattcaccttctttacgtctgacgcaaagcctgcggcagggcacctggcaggagaaaaagaaactaagcggctgattgcaatggcataacactaatgaacaattaacagacttgtgagtcttgaaattattttttagactcattggtctgttaattatcaattgcgtaaaatcttatgcctaattcgaccttatttttcatcaccctttgtctctctcgcgtcctggtgaccttcttcttctggatggcaggcatctacggcgtctttcatttcgcggagatcgttcaggagatggtaaccgtcggcctgccgtggccggtcttgttcgcggcgggcacgattttttgccagctggcgggttcggcgctgatcgtttttaatcctgccggctacggctggattggatcggggatgctgattgtgtttacattactcactattccgctgggacacgccttctgggccttcagtgaaccccggcgcactgaggaattccatattgcgcttgaacacattaccgtggtcggaggattaattatgagcgcgctgtttgcaggctatcggcgatgagcgaaacccctcgtcagaaaggtcggccaaaagatccattgaaaacgcaggcgatacttcaggccgcccgtaagctgtttctggaacagggcctggaggtgacaacggccgaaatcgcccgcgtagccggggtggcgaaagccaccctgtatgccaatttcagcgataaagaacatctgatagaggcggtcttacgccaggaatcggatctcaccatcagcgaccatgatttcgcccagcgccatcatctgccgctgatcgaggtactgacggcgtttggctatcgctttgtccgctttatcaaccagcgggaactgaccggctgggaccgactgatcgcctcggctgccgtgcgtcaccccgatctccccggccgcttttacgccgccgggccggggcgcgcgcagcagatgctggaagcgatcatcgccgaggcgatcgaagccggtactttacgagcctgcgatccgcaggaggctgccgacgaactggccggtttatggctgggaatgaccagcctggcgataaaacttggcgcaagacctccgctgtccgacgacgaaatcaaacagcgggttgagcgcgccctggacgtctttctgcgcgcgtattccctggcgccgggctgatctctccttgaccttttcagcgctgtcgtctggcgtaaggctgatttattgtgcccaatccgcgcccggcgcaaaaaataatgtccttgccggttagcattaaaagaaaataacaaccacagagtgcaacgcagattattccatgagggaatagtgggaatgctaatatttcatttcctcgccggtttttagaggcctatagtttttttacctgcagaacatccactaaggttaaaaaacataaggacataataatgattgtttcagcccccagcgattatcgcgaagccgctcgtcgtcgtctgccccgcttccttttcgattatattgacggtggcgcggtggcggaaaacaccatgaacgccaacgccgccgagcttgcctcggtagctcttcgccagcgcgtactgtgcggggccggcgaaccgacgctggcgaccacgatccttgatgccccatgggcgatgcccgtggcgctggggcccgtcggcgccaccgggatgtacgcccgccgcggcgaagtccaggcggcccgcgccgcctcccgcgccgggatcccgtacaccttatccaccgtgtcggtctgctcgattgaagaggtggcgagccacgccagcggcgcgctctggtcccagctgtacgtactgaaagatcgcggctatatgcgtaacgcgctggagcgcgcctgggccgctggcatgaaaaccctggtatttaccgtcgatatgccaatccccggctcgcggtatcgcgataaccgctcagggatgtccgggccgcacgccaccctgcgacaatatctccaggcttgcacccatccgcgctgggcgatgaacgtcgggctggcgggcagacccctgtcgtttggtaatatcgaagcctacaccggccacaaaatgaccatggacgactatatggggttcatcagcaacaacttcgacccgtccatcgcctggcacgatctggagtggatccgcgacagctggcaagggaaattaatcatcaaagggatcctcgatgccgacgatgcgcgcaatgccgtgcggctgggcgccgatggtattgtggtgtcaaatcatggcggcagacagctcgatggcgccatccccaccgcccgggcgctgcccagggtggtggatgcggtcggcgacgatctgacagtgcttgccgattccggggtgcgctccggcgtggacgttatacgtctgctggccctcggcgcgaaaggcgtgctgctcggtcgggcctatatttatgccctggccgcggcgggcgaagcgggcgtggcgcatctgctgcgcttatttgccgaggatatgaaggttaccatgaccctcaccggcgcgacctcgccatcggccatcagcctcgattgccttgatcgcctcgaacaggatcaacaccacactcatgcggtgccggtatccttacccgcctgaccctgcccgggacctggcctggccatgtgcctcgcccaggtccggcaaagtggaattacctctgaaggtgcaactctgtctgttgtaccgtgttcgccgggcggatgcggaaccagatcgcgtacatggccggcaggaagataagggtcatgatggttccccccagcgtcccgccaatcagcgtataggcgagcgttccccagaagaccgaatgagtgagcggaatgaacgccaggatcgccgccagcgccgtcagcagaaccgggcgggcgcgctgcaccgtcgcctccaccaccgcgtggaacggatcgagccccgcctgttggttatgatggatttggccaatcaggatcagcgtattgcgcatcaggatccccgacagggcgatcaggcccaccagggcattgatgccaaacggctgattgaacagcagcagcgtcgggaccacgccaatcagccccagcggcgcggtcaggaaaaccatgaccatcgccgacagcgaacgcacctgcaggataatgatcagcagcgtgagggcgatcattatcggaaataacggcaccatcgcccgggtggccttgccggattcctcaatcgaccccgccgtctcgatgcgatagccaggcggcagcgagtcgataatgggctgcagcggcttcatcagcgcggtggagacatccggcggctgcaggttctccgcaacatctccgcggacggtgatggtcggcgtgcggtcgcgacggcgaagcagcgggtcctccatcctgatcgacacgtcgccaatctgtgacaagggaacccgctgcccgccgctgcccaccagggtgaagtcggcgattttcgccggatccagacggatgtcgcccgccgcgcggccgatcacctgcacggcgcgaatatcttcccggacggtggtgatcgggatccctgacagcaggaactgcagctgctgggcgacggactgggagctgagtccgctcgcctgcagccggtcctgattgaggctgaaatgcatcaccggtacccgcgaaccccagtcggtattgacggtgcgcatcagcggactggcctgcagcaccgatttaacccgctcggcgatgtcgagcagagcgtgcggatccggccccatcacccgccaggcgaccggataaggcgaataagggccaaacaccagctgagtgacgcgcacccgcgcctccggcgccaggccattggccaccgcctcccgcagccgccgcttgagcgcctcgcgggcaccctgcccgtcggtcaacaccaccagtttggcgaaggagggatcgggcaattccggagccatcgccaggtaaaagcgcggcgcgccctggccgatatagctggtgacaatcttcgcctccggctgccgctgcagccagtgctcaattttcgccgccgcggcgctggtctggctaatcgacgacccgtaaggcagctgcacttcaaccagcacttccggacgatcggaggtggggaaaaactgctttttcaccacgctcatgcccaggatcgccacgataaacagcgccaccaccccggcggccacgcgccatttgtgagcaataacccgggtcagcagccgacggaagcgctgatagcgcggggtgtcatacagcgcggcgtggccggccgccgcgggctttctgtccggcaacaggtgcacccccagccagggggtaaaaatcaccgccacaatccaggaggcaatcagcgcgataccgacgatccagaacacattgctggcgtactccccggcggtggactgcgcaaatccattgggcataaagcccacggccgtcaccagggtaccggccagcatgggcgcggcggtatggctccaggcataggccgaggctttgaggcggtcatacccctcctccattttgaccaccatcatttcgatggcaatgatggcatcatccaccagcagccccagggcgaggatcagcgagccgagagtgatgcggtcgaagtttttgccggtcgccgccatcaccacaaacaccacggcgagggttaaaggcaccgccgccgcgaccaccacgcccacgcgccaccccatgctgacaaagcacaccgccatcaccaccagcagggcgacaaagaatttgatcatgaactcatcgaccgcggcgctgatattcaccgactgatcggtcaccttggtcaacgacatgccgagcggcaggctctgattgatgctggccgtttcggcatccagcgctttccccagcgccagaccattccagccctcacgcatcaccacgcccagcagcagcgccggttcgccctgatagcggatcaggaaggtggcgggatcttcataccctcgctcaaccgtggcgacatcggccagtttcagcgttctgcccccggcaataatcggcgtgtcgcggatctgctgcaggcggtcaaacgccccatcgaggcggataaagatctgcccgccccgggtctcaatggccccggcggcggtcagcacattctggctgttcagcgcggcaaaaatcgcctctggcgagagacccagagtggcgagacgatcatgagaaaacgagagataaatgcgttcagcctgttcgccgaggatattcacttttttcaccccggatacatgcagcagctgctggcgcagggcttcagcgtcacgcaccagctgccgcggcggctctccccgcgccttcagggcaaagatcgcaaaggtgacgtcggcgaattcgtcattcatcatcgggccggagacgccggcaggcagatttttcgcctcgtcgccgagcttcttgcgcgcctgataaaactgctccggcacctcggaaggcggggtctgatcctgcagcgacagggtgatcaacgccatgccagggcgggtataggtctccgtgcgatcgtaccactttaactcctggagccgtttttccagcggctcggcgacctgatcctgcatctcctgcgcggtggcgccgggccagacggtaatgaccgtcatttgcttgaccgtaaagggcggatcttccgctcgcccgagtccgaagaacgccaccagcccggcgacggagataaggataatcaaaaacagggtcaccgaccgctcgcggacggccagcgcggagagattaaaacgcccggcgctcatggctggctcccggcggcattatgctcgcgtcgttccgccagacgcaccgcctcgccctggtgcagaagatgggcgcccagggcgacgatcggctcgccgggcttcagcgggccggtcacccgcgcggtttcatcatccaggccgagcacagttaccggttgccaggagacggtggtcggacgagaggcaatgcgccagacgccagggccgttacccggatcgtagaccgacgccaggggcaccgccagcacctggcctggcgcctggtcgttgccgatgcgcagggtcacggtagaccccagcggggcattcgccagcgcgccgttcagtacatagcgcgcttcaaaggtgcgggtggtggcgtcagccgcgtccgaaagcaggcgcagggtcgccgtgaccggctgagattcgctgccttatacacacctgacgctgccgccgaacgcactggagaacagcacgatgcgcgcctcagcttagcaaagccacacacgaaagatgagaggtagactatcg

SEQ ID NO: 206 - DNA, 11691 bp, Unknown
  source: /note="Description of Unknown: MKP2_2161_1 Mutant Bacteria sequence"
gctttaccggctcgacggcgaccgggaaacagattgcccgcgtggctgccgaccgcctgacccgcgtgacgctggagctgggtggcaagaatccggcgattgtgctcaaagacgccgacccccagtgggttattgaggggctgatgaccggaagcttcctcaatcaggggcaggtctgcgccgccagctcgcggatctacatcgaagcgccgctgtttgacaccctggtcagcggcttcgagcaggcggtgaaatcgctgcaggtggggccgggtatgcaggagacggcgcagatcaacccggtggtctcccgggcccactgcgacaaggtggcggcctacctcgaagaggctcgccagcagaaggcagagctcatcagcggcagcgccggaccagatgcgggagggtactatattccgccaacgctggtggtaaaccccgacgccggactgcgtctcagccgtgaggaggtttttggcccggtggtgaacctggtgcgagtggccgatggcgaggaggcgctgcgcctggccaacgacagcgattttggtctgaccgccagcgtctggacccgcgatctgacccaggccctgaactacaccgaccgtctgcaggcgggaacggtatgggtcaacagccataccctgattgacgccaacctgcctttcggcggcatgaagcagtctggtaccggccgcgatttcggccctgactggctcgacggctggtgcgaaaccaaatccgtctgcgtgcgctactagccctccgtcggggaaggcgaaaggcttttcccgacgcgccccttgccgacctccggtctttctcgctactgtggagggcaatctttgcctaatctgggcggtgaatcatcaggaggtcttcggcatgacagcatttcctaaggttgcgctaattggtcccggcgccatcggcaccacgattgccgccgccctgtttgagagggggagggcgccgatggtctgcgggcgtaccgcccattcggcgctggtgctgcgcactgacgagggtgagatcgtggtgcccggcccggtgcacaccgacccgatggcgatagccgcccccttcgacctggtctttgtcgcggtgaaaaccacccagacggaggccatcgccccctggctgacggccctgtgttcccctgacaccgtggtgtgcgtgctgcaaaacggcgttgagcagcgccagcagtttgcccccttgaccgtcggcgcgacggtgctgccgtcggtggtctggttcccggcgcagcgcgatgccgatgcctctgtctggttgcgcgccacgacgcgcctgacgctgccggatctgccgggggcagagcgggtgcagcaggcgctggcgggaacccgctgcgcggtggacctggcggctgattttaccaccgtggcctggcgcaaactgttgcagaacgcggttgccgggctgatggtgctgaccggacgacgcgccgggatgttcgcccgggaggacatcactgccctcgggctggcttatctgcgcgaatgcctgcaggtggcgcgggcggaaggggccgccctgagcgacaacgtgccggaggagattatcgccggctttcatcgggcgcctgccgacttaagcacctctattctgatcgatcgcctcaatggccgaccgctggagtgggatattcgtaacggcgtggtgcagcgtcgcgggcgccagcacggcattccgacgccgctcagcgatatcatcgtgccgttgctggcggcggccagcgacggcccgggctgacccgggctggcgcgggtgcgagccactggaagcgggatctgctatgatcccgactttcgttgtctggagccagtcgatgttcaacgacgccattgtttatgaccgctacgggccgccggccgccgtgctgaccctgaaacgcctgccgctggcgccgctggcgggcggacgggtgcgggtcaggatgcgctttgccccggtgaatccttcggatctgatccccgtgaccggcgcctatcgccaccgcacccgactgccggccgtcgccggctatgaaggccttggcgaggtggtcgccgcgccatacggcagccggctggccgcgggccagcgggtgctgcccctgcgcgggggcggcacctggcagcggtttatcgatctggatgagacctggctggtgccggtgccgccggcagttgacgatctgctggccgcccgcgggtatatcaatccgctgacggcgatgctgatgctcaagcgctggccggttgccggaaaacacctcgtgctgaccgcggcatcgtcctcctgcgccagtctgctggggcagtgggcgctggcgatgggcgcccgctcggtgagcgggattattcgctcgccgcagcaccgggcgcgcctggaacaggccgggatctatccgatcctcgataccgaccgggcgctgatggagaaggtcagccagcacagcgatctggtgtttgacgcggtgggcggcgaactggcgaatacgctgctgtcggtgctgcccgggtcgtcgaccctgatctcctatgggctgttatccgggcggccgctgacccagacgcgcggtagcgcgacggtgcgcaagtttcatctgcgggaggcgctgccgacactcagcgtggcggcgtggcgggcagcgtgagacgaaagctggcagcgcctgccgacgacctcccagccgccggcccagcgtatagcgttgaacgacctgcgggcggcgattgccgccgccggccagccgggaagaggcggtaagatcctgctggatttcaccgccggttaagattactttttcttttcgcccagagtaggggtttcgtcaaagaagttccacggcttgagcagcgcgtgcgcccactcggtcggcatgatcggccactcttcggcgcgcgccacgtgggtggtgccggtggtgatccacacgacgtcatcgtggttagtcagcgactcatcatccttcgcgtactggcccaggccggtatcgtgggcggaacggttcgggtatttcccttccggatatcgctctgtcgggtggtagcgcgtcacccacagctgtttatccataaagctcaggcgatgatatatccactcgtccggggcgaatttggcaccggtcgccgccgggtgcgtgccgccggcgtaagggataatctggtatgagaccgggttgcccatgcggttctctttgctggtgttgctcagcaggcggatagtgcccgggtcgaatttctgcgccgctttttgctcgctgtcaatcgtgtactgattcacctgcatagtactggtgcgcgggccgccggcggtgttgggcttcacttccgggtccatcgccaccagggtgttgttctcgccgtccacatcgaggtcgaggcggaagttatagatgtgctggtgagtggtgccgacaatattatggtcgatcagcgttccgtagcgggtatcctctttggcgctggggtcatgcatagtcttcgccagcacgcctttcaccgcttcaatgccggtggcgccggcatcgataccgatggtgccgttgtcgtggaacacccagtcaaagatatagtcgtagttgccgacggtgctgatccagcgcaccaccagctcccggcgctcggtactgacgttgggcttgcccatctccaggtgcttatattccggcccggcatagcgttcgaatatggccaccgcgcctggaatcgtggtcggtttgccggtgtaatcggcgatagtttcgtccagcagtaccgcatttgacggcgcatctttaccgcgaacaatcggcgacgtcagggtgcccatgccgtaatcgcccgagtcgaggtaggctttgaaataccagccgacgtccgggtcgccgtagggaacgatcatcccgccgagggaaccttcatacatcacttggcgttttgtgccgttatcgttgtaggtcaccgttgacagaattggtccgacgcgcgagttaagacgcaggtggaaatcccagttctgccagtgaatggtatcgccggtaatggtgtagtttttgccttccggttcagtaatatccagcggtttcaccgccggggcgttgcggtcgcgaccatcatacggacggggctccattgggaccgggatcaccggaccttcttcgattttgatgattttcttcgcttcaaggtcgaccaccgccaccaggttttcaatcgggtgcgcccagtagttgccgtcgccggtatccagataactgaccaccttcagcagacgcgcatcctgctgcaggccatctttgccatcaaaaaagccaacggtgagcggggtggtgaccactttgccaggatcggtaataccgtgctttttcagcacctcagcgaattcgctgctggcattgatgatgttctgcacgctaacgaagtcatcgagcagcaccatcccgtgggcgcctttgatcggcgtccaggagaggatttttttgttttgcagatcgaccacggcttcaatgacgtgtttgccatcgagcatcaccacatcggcagtgcggggagcatcgaccggcgttccctgcagggcaaaggcccataccgccgccttgtccggctcgtgtaaggaaatctcagtaaagcgggtattcggctgaaactccggcgcggctttgacaatggtcactgcttcactgatttccgccgccgagagcgagtttaacgggtgcgggcgcttttccacctggaaggtctgatcgagaccggactggaacacatcgttgataaaggtatcggaaacccaggctttaccttccttcattaccacaggcaccggtaggtcaagggatttaccgttgacgatcgccgttttggcgccgggctttactttgacgtaagcgccgtcttttatcagggtgaacatttgcgcgtagtcatcccactgcacatcggcgccgaattcctgcagcgttttatccagcggtaccatgtgggcttcgctaccgtgagcgaagaccggtgattgccaggcgcaaaccaccgccacggccagcgccagcgcggttttacgaggagaaaatttcaagccgtttgccattgtgacctcatcttattgttgtgttgtctcttgccgctgcgaatgtcggctttgtcatccttaagctaccagccagcggcgccggggcgtttgtttgcttttgccagcttgtttgtcagttttgccagacgggcgtaaaaaatgcctccgcagaggcattgagaacgtgcgctgatttttttgccgggtggcggctgacgccttacccggcctacggtctgtgcggcctgccgttaatttattcaccattcttgctggcccgagcccgggggtacagggggcggcggcgactggccgccccctgtgcgctccctgcgctatgccaggcataacgcagacgattaaccgggagcgcaatgtgcgctgaagccacggataacataaaggacttcccggggcgaaaccgttgcaaaccgattgctgtatcaatggctaaagggtcggccaacagagcgccagcgatctatttttcgctatcacgccgggaaatctccctgttgacgcgccaccagggttagaatggaatacagcgccaccgcctgctggtgctggttgaaaatctccaccgcccattccaccacgccggtggctttctcatcggcgctgcgctgacgtttgaccgttttccgcttacaggtgaggcgaacctgaatggtgtcgcccggtttgaccggctcaataaagcgcaggttttccatcccgtagttggcgataaccggcccgacgccggcatcgacgaacagcccggccgcggcggagagcaggaaatagccgtggaccacccgctcgccaaaaatcgactcggcggcggcgattttgtccatatgcgcgtagaaatgatcgccgctcaggcaggcgaagttaacgatatccgcttcggtcagggttcggcgcggggttaataagctgtcgccaggctgaatctcttcgaaatatttgcggaacgggtgaatacggtcttcgttcacctgggcgccgcgcacccactgttgaccgatggtcgccagcatcgttgggctgccctggaccgcggtacgctgcatatagtgtttcaccgagcgcagcccgccaagctcttctccgccgccagcgcggccggggccgccgtgcaccagctgcggcagcggcgagccgtggccggttgactcaaccgaggacgcctcgttcagtatctgaatacggccatgggcgcgggcggcgccgaggataaactcgcgcgccagctcgccgctagcggtgaccaacgtccccgccagactgccgccgccggcgcgcgccagcgtcagcgcatgctggcggtcgcgatacggcatcagcgtcgccaccggaccaaaagcttcaatggcgtgaaccgccggcgtttcatccggctgtgagcagtacaacagggtcggcgggaaaaatgcgccggccgcgctgagatccgcctctccaccgagcagtacttcgcagccagcggctatcagcttattgacgctctcctgtacgtcctgacgctgttcgctattaaccagggcccccatcttaacgccctcctgcgcagggtcaccgacggttactttatgcaggcgggagatcagtgcatcgctaaccgcattaatctgagccagtggcacaatgattctgcggatagcggtacatttttgcccggctttcgccgtcatctcgcggaccacttcccgaataaacagcgcgaattccggttgctccggagtgacgtcttcgcctaacacgcagcagttgagtgaatctgcttccatggtaaagggaatggatttggctaccaggttagggtgcgcccgtagctgctggccggtggcggctgacccggtaaaggtcaccacgtcctggctatcgaggtggtcgagcagatcgcccgcgccgccgcaaatcaggctgatggcgccctccggcaccaggccgctgtcgacaatcgctttcaccattgcctgggtgagctgggcggtagcggttgccggtttaatgatagccggcataccggcaagccacgtgggcgccagtttttccagcattccccagcaggggaagttgaaggcgttgatatggacggcgacgcctgattttgatgtcagcacatgacgcgcggcaaaaccgccctgtttggagagcgggatgagctcgtcttccggccacaggatatcgtccggtaattctcgactaccgagcccggcataggtgaaaagggtaccgataccgccttcaatatccacccaactgtcggcgcgagtggcgccggtttgcgcggagatggcgtagaactggtctttctgctccagcaggtgtttcgccaccgctttcagcatcgcgctgcgttcaataaaggtcatcgcctgcagggctttgccaccgcgctcaatcgcgaagcggcgcgcctgcgccatatccaggccttcactggtcacctcccaaagcgccgcgccggtgatggcgtgatggatagtacgggcgcggccccggccggtctgccaggcgccggataagtagctggctaactgctgcatcgcaaatctccaaatgtgttacgtgtgatatctataaatagttcttttatgaatcataaaatgcaagcccgtatttaataaattattaacattgtgatcgcgatggcgttacgcattatgcttaatttactgtatttattgtggtttacaaaaggttttgcggagattatcacaaaaagagcaaacaaaatttgtggttttatttaaccaatatgtaaccttcaataaataaagtgattcacataaatttttttgttgtgaatatcggaatcataaaggtgatgacgtgacagaagaacaacgctttgaccagcgcatcgcgcaggaaacggccatcgaaccgcaggactggatgccggatgcctaccgtaagaccttgattcggcagataggccagcacgcgcactcggagatcgtcggcatgctgccggaaggcaactggatcacccgcgcgccgacgctgcgccgcaaagcgatcctgttggctaaggtacaggatgaggctggacacgggctgtatctctatagcgccgcggaaacccttggctgcgcccgggaagacctgtatcagaagatgctcgacgggcagatgaaatactcctccatttttaactacccgaccctcagctgggcggatatcggcgtgatcggctggctggtcgatggcgcggccatcgtcaaccaggtggcgctgtgccggacctcctacggcccctatgcccgggcgatggtcaaaatctgcaaagaagagagctttcaccagcgtcagggatttgaagcctgcatggcgctggcgcagggcaatgacgcgcagcggcagatgctgcaggacgccattaaccgcttctggtggccggcgctgatgatgtttggccccaacgatgacaactcgccgaacagcgcccgcagcatggcgtggaaaatcaaactgcactccaacgacgagctacgtcagcgcttcgtcaacaataccgtgccgcaggtagagatcctcggtatgaccgtcccggacccggatttgcagtttgatgaagccagcggccactaccgcttcggcgaaatcgactggcaggaatttaacgaggtgattagcggccgtggcatttgcaatcacgagcggttggccgccaagcgtaaggcctgggaagagggcgaatgggtgcgcgaagccgcgctggcccatgcgcaaaaacagcaggcccgcagcgcggcatgaggagagacaacatgagtaaagtttactggccgttatatgaagtgttcgttcgcagcaaacaggggttatcccatcgtcacgtcggcagtctgcacgctgccgatgatcaaatggcgctggagaatgcccgcgatgcctacacccgccgcagcgaaggctgctcaatttgggtggtgaaggccagcgaaatcgttgcttcgcagccggaagatcgcggcgaattcttcgacccggcggaaagcaaagtctaccgtcatccgactttctataccgtgccggacggcatggaacatatgtgaggcggcgatgaataaccctaaccccgtagccacctacgccctgcggcttggcgacaatggtctggttctggcccagcgtttaggcgcctggtgcggccatgctcccgagctcgagatcgatcttgcgctggccaatatcggcctcgacctgctcggccaggcgcgcaattttttaagctatgccgccgagcttaacggctgcggcgacgaagatacgctggcttttggccgcgatgagcgccagtacagcaacctgctgctggtggagcagccaaacggcaattttgccgacactatcgcccgccagttctttatcgacgtctggcatgtcgccctgttcagccggctggtgaacagccgcgacgcgcagctggcggccattgccgctaaagggctgaaagaggtgcgttaccaccagcgctttagccgcggctggctggagcgtctgggtaacggcaccgaattatcaaatcgcaaaatgcagcaggcggtcgacaatctgtggcgcttcaccggcgaactgttcctggctgatgaagtggagctcagcctggttgagcagggcattgcggttgatccgcgtgaactgcaggccgaatggcaaagcgcggtacacacggcgcttctcgactccggcttacagatcccgcaggaagcggccttccgcagcggcggcaaacaggggctgcacagtgaacatctcggcccgctgctggcggagatgcagtatctgcagcgttcgcatcccggactgcagtggtaagtgaggtgactatgcaacgtcttgccgatatcgctcctgcagaggttcgcaccatctggggattattaagcgcgatcccggatccggaagtgccagtactcaccatcaccgaccttggtatggtgcgcagcgtcgcgcgccatggcgacggctgggtgattggctttaccccgacctattcgggctgtccggcgacggagcatctgctgggggagatccgcacggtcatgagcgagcatggctttcagccggtacatatcgtcctgcagctggatccgccgtggaccaccgactggatgagtcaggatgcccgcgagcgcctgcgccagtacggcatcagcccgccccaggggcacgcctgccatgcggacatgcccgttgaggtgagctgtccgcgctgcggcagcgcccatacctcgctgattagcgaattcggttccacggcctgcaaagcgctctatcgctgcgacagctgccgggaaccttttgattactttaaatgtatttgaggttgccatgacgacgttccattcgcttaaggtggcgagagtcgagccggaaacccgcgatgcggtgaccatcacttttgcgattccgcaagccctgcaggcggaatactgttttcgcccgggccagcatctgacgctaaaagcccgtctgggcggcgaagaactgcgccgctgttactccatttgtcacagccgcacgccaggcgaaattagcgtcgcggtcaaagccatcgacggcggacgcttctcgcgctacgcccagcacgatatccagcagggtatggagctggaggtgatggtgccgcaggggcatttcggttatcaaccgcaggccgaacggcagggagaatatctggcgattgccgccggctccgggatcacgccgatgatggcgatcattagcgcgacgctggcgaccgagccgcaaagccgctttacgctgatctacggcaaccgcagcagccatagcatgatgttccgccaggcgctggccgatttaaaagaccgctatccgcagcgcctgcaggtgatccacctgtttagccaggagtcgatggacagcgatctgctacaggggcgcattgacggcgacaaactgcgccagctcgctgaccatctgctggatttcagccgtttcgacgaggcctttatctgcggtccggcggcgatgatggacgaggcggaagcgacgttacgtgaacttggcatagcggagaaatcgattcatctcgaacgctttaataccccaggcggcaatgtgaagcgggccgctggagtgcaggcggaagggcgcacggtgaccatccgccaggacgggcgcgatcggcttatcgccctcagcgccgaagacgacagcatcctggatgccgcattgcgtcagggcgccgatctgccgttcgcctgtaagggcggggtatgcgccacctgtaaatgtaaagtgctgcgcggcgaagtggcgatggccgccaattacagcctggaagcggatgagctggcggcaggctacgtgctgagctgccagtcgctgccgaccagcggcgatgtggtggtcgactttgacgcgcgggggatggcatgagtgacctgctgatccaccgtcatggccgggtgcttcagttgacgctgaaccgcccgcaggcccgcaacgcgctgaacaatgccttattaacccagattgccgaggcgctggaggcggcggcagttgatgacagcgtgggcgtctgcgttattcgcggtaaggcgcgttgtttcgccgccggggctgaccccaacgaaatggcggaaaaagatcttcctgccaccctggatg

SEQ ID NO: 207 - DNA, 11616 bp, Unknown
  source: /note="Description of Unknown: MKP2_2161_1 Mutant Bacteria sequence"
ggcaaatatcccgccgccagcgcctgatgcagtgctgatagagaaactggcgaaagcgaaacagctgaacccggcaacgggcagaccgctgccgacgtcaccggactttgagaaggacagcgtggcggctccgtaaaggactgaacgaacgtgccatccgtttcttccgcgagggagacatcataccgttggataaattaaatcttgtccgcctgcgctcctgctcgcttggcgataaatggctgcggggagagaggcaggtgctctggcgactgacgggcgaggcataaatctcctcttacggcgagttatcgctggcattaatacctataaatttaaggacaaatcatatgcgtaaatttttaatcggattttttattttcttctcaggaatagcaacggggcagtctaatttagaagattttaatcattcgccgaagtgggtggattcggctgggcaaataaatcctgacccgggattgatgaagtattttcagaatatgaaatttgtctgtcataacgcgtctggatttacacctaaagaaaataagagtgctgcaaaggcgttcagtgaactggttcagtatacttctgagggagatcaaataaaaggtttctggaacagtcctgaacataagcaaaaacgtgaaggactgcttgtaacagcaataaaagccggaagctggaaggccgcatatgtaaatagtgtctgggcaataaaatatccgagtgcggagactccgatagaggttgcttccaccaaactccacgaactcgtttctcggggcatccctattgctgcctataaatatgcgtcgtatttgtttggtcgcgattatgaaacaatgtactacttgtatgctgaagccatcaagcgtggcagtccacaggccatgtcagcagtaggaggaactattgttgtcagggttcaggaactgcacccattaggtaagcagttgctggaatgtgcggtagggcaaggttatgcagaggcttatgatcatcttggcttgcttgccgatatggaaggcaggagattagatgcctatcatttgtgggaaaaaggcattaatgaaggatgtgaaggctgcatcaaaaaaatgagtaatctggctaaagttcggcatggttattctgcggatgtgccgatgatggaattgatgcccgaactcatgaggattaaagaattcaatgaaaataatttcgtctatcaattgactgaattgccagatttctatcgtcgtctgccggaggaactgattttccatctaaacgattccgaacttttaagtctgcttaagctggagaaattttctcgcatgttgtaactctgaaactcaggaaatggctgcgcaaagaatttcgctaatgattgcagctatttattttccttaaatgctacaaggttaataaagttatgaaaggaattatccgtacaggcgatacgcataccgggggcgggaaagtgctccgtggttccagtaatatgaaatttggtggtatcggcgtggcgcggctgggcgatcccgtcagttgtccgatcaaaggccatggtccgacggtgattgccgaagggcaccccacttttagcgatcatggtataccggttgcgttccatggccaccgttgtgcttgtggctgcatattgctgtcgagcctgccacaagccagggtgcgctaacgatgcctgtcgatttaaaacgtattcccccgcctgctcaacggcctcgagcaccggtgtggtgggtttggttgctgtttttgctgtgttggctggcagcgggcacctgctgggccattatgagcaataaagataaactccaaatacacaccgcggatttttggcaaacggcgttgatattaccggcattattctggcttattctgctggcgttgcgtatcgcctggtataaaggattactgtcaatggctgatggctgggataacgatcgtgaacagcttttgagtcgtgaaatccagagagggcggcgtcacctggcaatcctgggcgtgagcttacacaccgcattacgtctcccggatgatcgggatggtaaggggcagcgagaggcattacgaaacaataccccggctttaaaaacgcagccttcctggtggagtgacgaaggtatacgacatagtcggctgttgcgtatcggcgacgaaacgcccgaacagttggttaggcgcatcatgagcaatacgttgaatgagctgacttctgtactggcatctgttcctgcagagacaccgctgtcattaatcatagagagcgacggcagtctgtccgtcagcgagatacagtcgacctggcgccagtgtttggcgaacagtcacatccggcaaccggtgacgtatctggaaggcaaagggctgcagatgatagaccactggctggatcagccgatgactgagccatccctgatgctgattgtggcgctacaggttgctcccaaacaggttgagggaacggcagaaacggtggttagcctgttgcttgccagtcctcaggtcgcggcggatcttatgccactggcgcttctccaccgaccagagcaggtgaaggggataagccacgaggcgtttcattatgcctttgcgcgcgcgtttgactgggccgcgttacccgcggaggccgtgcctgccggttggttggtgggtatcaagatgaactatcatcagcccatcgcaacgggattgatcgcgttgtcgagcccgatcaatatcggtcgtgatttctacaacctggacagtagcctgggttatcccggcgtcgcagccccctgggtcgcgatcgctggagcaatcgtgcggtacggtgacgataaatctcaactcattgtgagtggcgacggttttgccgaccaaccattatgggccacggtgatcaccccattaccactatcatcagagcttcaccaggccaggcccgttcgcgctgcctgagaggcggcaagcctcgtgactacacactatctcatcagacggtcatatcagcccctggtggtgggtctgaatctttctcgaatcttcttactgcaggaaataaggatgaatgcaacggatagcatattgcgcttaggtagccgttttggggtgctgatgctgatagctggcgcaatattgtgggggatatatcactatggcgacaagattggattgaatacgctgcaagcgaaactctatttctgcctgggcttagggatccttattctgctttttcgttatggcggccgtattgtgcagttcatactcggccgccatctgaaggggcagggggcgccattgacaagtggtcagcatctgaagccggcttcccagagtcaccgcgcagttattgagatgaggcagacattgcgtcgccagtatggtcgctttggggctggcaaaatgaccattctgatgctcacgggaagcgtggcggatgtcgaacgccttgcaccgggcctgagtagccagtactggcaggagaatggagacacattattgctttggggtggggaaccccagagcgcgtcggataatgactggctttttgctttgcgtaaacgcttttgcccccctgtgaatgggctggtgtgggtcacttctgcgtttgatcatctgcccgcagccaatcagcacgtatcccccgctttgttgtccatggaggatatagataacattgcccatgatctggctgaacgtttctcactgctagggtgggctgtaccactgtatgtctggtcgctgcatccccaggcggatgatcaggccgggcgcatcgtgcaatctgtcggcagtctcttcccgccagactgtcagtcgtcgcagatgcgccagttactttcggcgttgccctcaagactgttagagactggagtacaacagctcacgggtaatccgcagcatcattttcttctgggcctggcggaccaactcacgcggcagccggagcggattagtgttcccctgtcgacgtttctggaacctcatcgtgcgttaccgttagccggcgttgtgttcagcccgtcatcgccgcaggcgtcgcacagcctgaagcatcattggcgccacgataaacgctgggacgtgctactggaatctctcaggccatccggcttaaaagcacgaaagatcggctttccctggcgaagagctgtctctgcctccactgccgccctgatgttactctgggccgcctcaatgacagtctcttttatcgccaaccgccacctggtggcgatcgcacaggagcaggtgcagcaggcctcggcgggaaaacagccgctggccgtacgcctgcatgcgctctccgcgttacagaaaacgctttctcaactggaataccgctcgcagcacggagcgccgtggtacctccgcgctggtctcagccagaatgatgacctgctggcggcgctgtttccgcgctacggggagatggcgcaaccgctgctgcgcgatgcggcggcgcatcatctggaagagcagctcaccgccttcgtgcagctgccgccggacagcccactgcgtgagaagatgacgaagaccgcttacggacaactgaaacaatatctgatgttgatccgcccggaaaaaatggacgctacgtggttcgccaccacgctgatgcaggactggccgcagcgctcaggcatcgctgacgccgtctggcagggcagcggcccttcgctgctggcattttatgccgccagcctggcatcgcatccgcagtggcgtctgcctgtcgatgacggtctggtcagccaggtgcgcacacggttaattcgccaactgggccagcgcaacagtgagtccacgctttaccagaagatgctcgcgcaggtggcgaatcagtatgccgatatgcgcctggcggatatgactgccgacaccgatgcttcgcgtctgttcagcactgatgaggtggtgccgggaatgtttacccgtcaggcctgggagcaggccgtgcagccggccattgagaaagtggtcgcggaacgccgcgatgaaatggactgggtgctgagcgatacgaagcagactgccgcgcagtcgacgtcgccggaagctctgcgagccaggctggcggagcgttatttcgctgatttcagcggcgcctggctggatttcctcaacagtctgcgctggcagcgcgcggcgaccctctccgatgctatcgaccagctgaccctgatggccgatgtgcgccagtcgccgctggtggcgctgatgaacaccctgagcgtgcaggggcgaaccggccagaccggggaagccatcgccgattcgctggtcaaatcggccaggcagctgttcaaccgtgataactcgcccgtcatcgatcaacggtccggcgcgcgcggtcctctggatgccaccttcgggcccgtactggcgctgctggacaatcgcgacggcgggacacccaccagccgtcttagcctgcagaccttcctgacccgcgtcacccaggtgcgtctgcgcctgcagcaggtcaccaacgccaccgatccgcaggcgatgacccggttgcttgcgcagacggtattccagggcaaggccgtggatttaaccgaaacgcgcgactacggcagcctggtggcggcggggctgggccaggagtggagtggatttgggcagacgctgtttgttcgcccgatggaacaggcctggcagcaggtgctgaccccggcggcggaaagcctcaacgcccagtggcgcagcgcagtggtggaggactggaatagcgcttttggcggtcgctacccctttaaaaataccagcagtgaagtctctctgccgctgctggcaaaatacctcaacagcgagaccgggcgcatcgcccgctttctgcagacccggctgaacggcgtgctgcataaagaggggagccgctggatggcggacagtatcaatgctcaggggctgacgtttaacccggcctttctgcaggcgatgaataccctgagccatctctccgacgtcgcgttcgccaacggcgaagcgggattgcattttgcgcttcgccccggcacggcggacggcgtgatgcagacggagctggtaatcgacagtcagaaacttgtctatatgaaccagatgccggtctggcggcggttcagctggcccgctgacaccgaagcgccgggcgccagtctgagctggatcagtacccgggcgggcacccgccagtatggcgatttcccgggcgcctgggggtggatccgtctgctggataaggcggtggtcagcgcttatcccggaacgagcagcagctggagcctgagctggaaagcgccggatggtctgttgctgaactacacgctgcgtaccgaggcgggggaaggaccgctggcgctgctggcgctgcgaaactttacgctaccggagacgatattcagcgtgcgcgcgtctgctgaacgtgttccgctgaccgacgatatacccggcgaagagggatactgaaccttctccctcactgattggcgttaacctgcaacgccaggcctccttcgctcatggccgcccgacggccaactaatctgaccgcgcagccatgctgcgtgtctccctgtagacgaataatggaatattcataatggacgatttaaccctgcgatattttgacgctgaaatgcgctacctgcgcgaggcggcaaaagcgttcgcgcaggctcaccccgatcgggcggcgatgctggatctcgataaagccggtacgccggacccttacgttgagcgcctgtttgaaggctttgccttttccgtaggtcgcttgcgcgaaaaaattgatgatgatctgccggagctgaccgaggggctggtcagcatgctgtggccgcactatttgcgcaccattccgtcgttatcgatcgtggcgctgaccccaacgctgccggcgatgaagatagcggaaacggtgcccgccgggtttgagattagctcccgcccactggggccgaaaaataccgtgtgccggtaccgaaccacccgcgatctgacgcttaacccgctggcgatagatgaggcgatgatgacggcggagccggacgggcgttcggccctgcgactacgattcgcctgtagcgagctggctgactggtcgcagaccgatctccgccgcctggcgctgtacctgggggaagacgccgttaccggcagcgccctccatctgtggctgacccgacgccaggccgcgctgtacctgcgtctgccgggtcagacagagcgggtaagcctcgacggctatttttccccggggggattcagcgaggaggatcgtttatggccgaagggggagagcgctttcagcggctatcagctgctgctcgagtatttcacctttcgcgaaaaatttatgttcgtgcagctaaatggcctggaaaacatcaccctgccggcggggatatcgcatttcacgcttgaggtggtgttccgcgaggtctggcaaagtgatttacccgtcagcgcaagcagcctgcgcctgcactgtgtgccggtgattaacctgtttacccttgaggccgatccgttgaccatcagcgggctggagagcgaatacctcctgcgtccgaagcgcctgcaggacgggcataccgaaatctattctgtcgacagcgtgaccggctccgggcgcaccggggaggcgcgctatgtgcctttcacccgctttcgtcaccagggcgggatgatgcgtcgccatgctcctgagcgctactaccacacccgcgtaaaacggggcgtaaccggcatgcacgatacctggcttatcctcggcggacagcaatgggaggctgaccgggagctggcgcgggaaacggtctccttgcgcatcaccggcactaacggccagctgccgcgccgggcgctacagagcacgctgctggatcgctgtgagtcgatatcagccacgccgcttaccgtccgcaatctctgtaggcccacgctgccggcctatcccccggcggaagaccgctaccactggcgggtcatgagccatctgggcacccgttttctcaacatgatgagcagcgccgaggtgctgcgcggcacgctgtcgctctacaactggcgggaggatgagctcaataatcgccgtctggacgccattctggcggtcagccatcaccgaattcagcgtttcgagcagggcttcctgctgcgcgggctggatatcgaagtgacgctcgacggtagcggatttaccggtgcgggcgatgtccacctgtttggcgacatgctcaaccgctttttcgcactgtatgccgatatgaatcagttcaaccagctgacgctcattgttcaacctgaagggaaatgtatccggtggaaagagaatcacagtctgcgcctgcccggctgatggcgcagctccggcctcagttgccgtacatgaatttttaccgcttctgccagttgctggagaagaaccatccgaaggcgccgatcatcggcagcggctggctattaggtgatgaacccatacgctttcgcccgcatccggggatgggctttccggctggcgaaatccgtggaatggacgatcctgaaccgccccgtccgccggcggttcgcgtgacttttatgggactctacggcgtggaatccccgctgccgacccactatagcgatgacattgcgcaacggcgggaaggcgtcgaggccaccgaggatttcctcgatatctttaaccatcggctgatcgcccagtattaccgtatctggcgcaaatattcctacccggcaacctttcgggcgggcggcacggacaacatctcgcagtatctgctcggcctggcggggctgggcataccgggatgtgccgccgttgccgcagcgccgctgtcgcgatttctggcgctgctgccggtgatgatgctgccggggagatccggggaaggcatggaggcgctggtggcgctcctggccccggggacccgggcgacggtgtaccaccacgatccctgccggatccccttgtcgcagccgttaacgatgagcgtccgtcagccggttagcctgcaacataggccagtgatgggaacccacgccacggatgtgaacggtcaggtattgctgcagctggccacggaaaagcctcatgaggttcgcggctggcggcccggcggcgaactgttcagcgacctgatggcgcttctgcacgtctggctcggatctcatcttgacgtgcggctgcagctttgcgtcgcccgccatttactgccggatgcgcaactttgctgccagcaggagcatgccgtccagctcggccgtaccgctgtgctgcgtcctctggatgcgcagaaacaggctgacgacagagtcacgatttatctggggcgctatcagcgcgtccgggaaaatatccaccgcagggagagcgatgaagatggcgattaccgcagttaaaccctccgccaggttgctggcattcctcatggttaccgtcttaaccggctgcggcctgacgcagaccgtgaaagacggcgccgtttccgtgacccagtccattttttacccccaggtgaaaaccctgcatctggatcttcgcgcccgggaaggcgtgaataacaacgccaaaggcgcctccctggcgacggtggtgcgtatttatcagctgaaggaccggcaagcgttcgacaatactgactacccgtcgctgtttgccggcgatggccaggcgctgcaggcggaccgggtggcggaaaaagatgttcgcctgcgtccgggcgaatcggtgaccgtcgatatgcccatggaaaccagcgcgcagtttgtggcggtggcggccatgtttatcgatccagacctgacgcaaaccagctggcggctggtactcacccgggacgaacttgatccggcgaggccgcgcattatcgaagccagccaaaatcaactgacgctgcacccgtttaaggagaagtgaaaatgcctcgtccctccctgtatgacatcctgtacggcaatttcgccggcgggcttgacctgaatactgtcagcgaaacggatcaggtcatcctgtcggtgctcgataacatgcagcgcatcctcaactgtcgggccggaacgctggcgcatctgccggactacggcctgccggatatgaccgctgtcctccaggggatgccagcgtcggcgcatcagctgatgagcacgttgtcggcggtgttgctgaaatacgaaccgcgcctgcagcggatcgcggtggtgatgctcgatcagcatgcgcccggcgaactgcgctatgccattgatgcggagctgaaggatattggcctggtgcgttacggcacggagtttatgcccgagggcagggtgttgatccgccacctcaaacgtcagcagtaccttgacgcccgctccgccctctaatctctcgctgaaagacatcatgatgacaacacaccacgaccgtcactataaagccggtggcgacccgcgcacgctggctgattttatggccctgcgtgcggaaatgaacaagctcagccacccggcgcggccggatattaactggccgtatgccgagcagcttgcccgcgggctgttggagcatcacggcgcggacctgcagactgtcgcctggtataccctggcccgcgcccggctgggcggggtggcagggatcaatgaggggctgacgctgatggagtcgctgctggttcgtcaggggaaaaacctgtggccacaggcgctcccggcccggacagagatcttccgcaccctgagcaagcggctgcggcaggtgatccgtaccctgaatcttaccccagaggatgttgagtcgcttgagcaggctgaacgttcgctgcaaagcttcgacgcagtgctccagcgccttgagatcgctcctgaaaaccagctgagcgacctgcgggcgctactgcacagcacggcaactcgcttcgagagcctcgaccctgcgccagcgcttcccaccgcgccgccggtggcggtgtctgacgcggaacttcccggcactctggtcagcgaagaggatgcggcgaaggttgagccagtgccagacctaaaacgtagaccaaaggctcagccgctggctccgccttcacctgcaaagcggcccgcgccggtggcggcgtctactccggcagccgcgccgcgctggaagccgtttatcgccgggatggttaccatgctggcggtaacgggtatcgccgtcggcggatggctggcgctgcgtcagtccgacttgccgcccatttcggtcacccaaaatgccggaccgataccgggcctgccggcgacaacgcccccggggccggttgatctgccacagacgcagcgccagcttggcgagcttgcccgcctggcgccggactgggcggtcagctacggcgaccagctggtccaccaggccctgatccgctggccggatcaggcgcaaccgctggcgcagcagtggcggcccccgctgcgcgcccggcgccccccccccccgaccgccccttgtccagcgtcaggtgtgtataagtgtgtataagggtccgcctttaccccctatgtggtgatgcgcgtcggcgacgtcccggtggttccctactaccggccgggcgatgaccgtattgcccaggcgctggccgggctggcgccccgctataacgcctttttactggc

SEQ ID NO: 208 - DNA, 10719 bp, Unknown
  source: /note="Description of Unknown: MKP2_2161_1 Mutant Bacteria sequence"
cccccgcggccctcggccgtgcccggcaggccggggcagcccgcgtggatgcgggttgagggccgtgctttgcagggacgctgcctcggcccgacccgaagcctgcagggataagtcgaagggaccgcgcagcggcgattgtgctggccggagcccgggggtacagggggcggcggcgactggccgccccctgtgcgctcccggcgccataagtgacataacgcagacgattaaccgggagcgcaaactacgctgaagccacagataacataaacaaccacactgcagtgcttcccctcaccctggccctctcccggagggagagggaaccgtccggctggccgcgcaagcgcagcgccgccgggcgatggcagcaggctcggagccgcatctatgccgggtggcggctggcgcctgacccggcctacaacccctaccattcgaatcaatcgcggtttttgtagcccggacaagacgcgccaggcgccgcatccgggaatgcaacggcgatgacgttacttctgccttttcgcgaattcatctttggctttctgcaactgctgctggaaggccgggttggtgtgcagcgtagcgaccaccgcggagccgacgatgcgcgccgcatcgacatcgctctgccagtgatagccgcagatcacccggctctcgccgagctcatagccgcgcttcaaaatttcgttttgccgctgcgggttgatctccgccagcaccagggcggtggcccagccgatagaggtatgcccggacgggtaagagccgtttttcgccagcttgtcctgttcggtggtgttgcaggtggagacgccatagaacgcaaacgggcgaatgcgcatgtatttctctttcgcgctgcgggtcgccaggtcgccggcgtcttcaatcatattggtcagcagtttgtgaagctgcggcgcgtctttctcggtgatcggcgaaccaaaggcgctggagaaggcgttggccacgccgcccgcgctgaggttggcatcctctgccgccagcttcccgcgctcggtattgcgcagcagacgtccttgctcatacatcgcctgatcgtttaaaaatgcgatactgcccaccgccggcggtggtggcaacagcgccaggctgtcgatggcctgggcattggtcagatagtagagatcgggcttggtggtgacatcgttcccggggggaaccagagcaaaggcgttaacggagaagaaactggccaggcaaagggcaagaacacgctttttcattagaatttccttacgtcataatcattccagagaagacagtcctgtgctgtcacatttctgtcatctttaagtaaaagtgaaaatggtcgggaaaaaattgtcgcgtctcgcaaaaacggctttttgtctgcttaatgagcagccatacgcgatttcagactgtcgtacttaccaccctggcgtttgggcgctaacatagcgggattgcaatgacaggagatgtccatgagcgagcaagccattcgtttaacgcaatacagccacggagccggttgtggttgtaaaatttccccgaaagtgctggaaactatcctgcatagcgagcaggcgaagtttgtcgatccaaacctgcttgtcggcaacgaaaccagcgatgatgccgccgtttacgatctcggtaatggcacctcgatcgtcagcaccaccgatttctttatgccgattgtcgataacccgttcgactttggccgcatcgccgccaccaacgccatcagcgatattttcgctatgggcgggaaaccgattatggcgattgccatcctcggctggccgatcaacaccctggcgccggaaatcgctcgcgaagtggtggagggcgggcgctttgcctgccagcaggcggggatcgcgctggcgggcggccactccattgacgccccggagccgatcttcggtctggcggtcaccggcgtggtgcccaccgagcgcatcaagaaaaacagcaccgcccaggcgggttgcaaactgtatcttactaaaccgctggggatcggcgtactgaccaccgcggagaaaaaatcgctgctcaagccagagcatcagggactggcgacggagaccatgtgccagatgaacctcgccggcgccgcgtttgccgccatcgacggggtgaaggcgatgaccgacgtcaccggctttggcctgctcggccacctcagcgaggtgtgccgcggggccggcgtgcaggcgcagctgcgctatgccgatatcccaaaactgccgggggtggaggactatatcgccgccggcgcggtgccgggcggcaccgggcgcaactttgccagctacggccatctcatgggcgagatgccgacggagtggcgggatctgctgtgcgatccgcagacctccggcggtctgctgctggcggtgaccccggaggcggaggcggaagttcaggccgccgcggcggagttcggcattaagctggccgccatcggcgagctggtgaccgcccgcggcgggcgacccatgatcgagatccgttgattcgatgcggttgtttattgcagaaaaaccgagtctcggtcgggctatcgccgatgtgttgcctaaaccgcaccgcaaaggcgatggctatattgagtgcggcaacgggcaggtggtcacctggtgtatcggccacctgctggagcaggcgcagccggacatctacgacagccgctatgcccggtggaatctcaacgatctgccgattgtgccggagaaatggcagctgcagccaaagccctcggtcaccaaacagctgaatgtcatcaagcgcctgctcggcgacgccgaggaggttatccacgccggcgacccggacagagaagggcagctgctggtggacgaagtactcgactacctgcagctggcgccggagaagcgtcagcaggtgcagcgctgtctgattaacgatctcaacccgcaggcggtggagcgggcgatcaaccgtctgcgcgccaacagcgagttcgtgccgctctgcgtgtcggcgctggcgcgggcccgcgccgactggctgtacggcatcaatatgacccgcgcctacaccctgctggggcgcaacgccggctatcagggggtgctctcggtggggcgggtgcagaccccggtacttggcctggtggtccgtcgcgatgaagagattgaaaatttcgtcgccaaagatttcttcgacgtgaaggcgcatatcgtcacgccgcaggaggagcgttttgtcgccacctgggtgccgagcgaagcctgcgaaccttaccaggatgaagaagggcgcctgctgcatcgtccgctggccgagcatgtggttaagcgcatcgaaggccagccggcaatcgtgaccggctataacgataagcgcgattccgaacccgcgccgctgccgttctcgctgtcggcgctgcagattgaggcggccaaacgtttcggcttcagcgcgcagaacgtgctggatatctgccagaagctgtacgaaacccacaaactcatcacctatccgcgttcggacagccgctatctgccggaagagcacttcgctggccgccatgcggtgttgaatgcgattgccgtctatgcggcggacctgctgccgcagccggtagtggatccggagatccgcaaccgctgctgggatgataaaaaggtcgacgcgcaccatgcgattatcccaaccgcccgcagcagccaggtgaagctcaccgataacgaagcgaaggtgtacaccctgatcgcccgccagtatctgatgcagttctgccctgacgcagtgttccgcaaatgccagattgatcttgagatcgccaacggcaagtttgtcgccaaggcgcgttttctggccgaggcgggctggcggacgctgcttggcagcaaagagcgcgatgaagagaacgacggcacgccgctgccggtggtggccaaaggcgatgaactgctgtgcgagaggggcgaggtggtggagcgtcagacccagccgccgcgccactttaccgacgccactctgctgtcggcgatgaccgggattgcccgcttcgtgcaggataaagatctgaagaagatcctccgcgccaccgacggcctcggcacggaagcgacccgcgcagggattatcgagctgctgttcaagcgtggtttcctgagcaaaaaggggcgctatatccactcttcggaggccggcagggcgctcattcattccctgccggagatggccgggcgaccggacatgaccgcccactgggagtcggtgttgacgcagatcagcgagaaacagtgccgctatcaggactttatgcagccgctggtggggacgctgtatcaactgatcgatcaggcgcgcagcacgccggtgcgtcagttccgcggcctggtggcgccgggcggggcgaagaagtcgttcagcaaaggtaaagggaagccgaaaggcaaaaaagcggcagacgataccgcgccgccgccgcagtaacccgccggtggtcgcgaggatgcgttaccccgcggccaccgcttctccgccagccaggccaatggtctacactaaacagccgggaagagcctggacgcggggcccctgagcaggggatgcccgctgcgcttttcctgaggccgatgccccatttctctcacaggcgataaggaggacccgtgaaatatattgctatcagccaaccgggcggcccggaggtattgcagatccgcgaaggggagatccccatcatcggggagcatgaggtgctcattgaggtgaaggcggcgggcgtcaaccggccggatattctgcagcgccagggtctgtatcccatgcctgagggcgtcacccccgtgcccggcctcgaggtggcgggcgtggttgttaaggtcggcgcgcaggtcacagcgtttacgcccggcgatcgcgtttgcgcgctgaccaacggcggcggctatgccgaatactgcgccgtgccggcaggccagacgttgccgatcccggcgggtctcagctttagcgaagcggccgccattccggaaaccttcttcaccgtctgggcgaatgtcttccagctgggtaagctgcagcctggcgaaagcattctggtccacggcggcgccagcgggattggcaccaccgcggtcctgctgtgccacgcgctggggatgaccgtctatgccaccgtcggccaggacgaaaaaattgctgcgctacgtccctatgctacggcgattaactacaaaaccgatgattttgccgagaaaatcggccagctgaccaacgatgaaggggtggacgtcattctggatattgttggcggcccttactttaaccgcaaccttgggctactgaaaaaggatggacgactggtcatcatcggctttatgggcgggcgaatcgctcatgaggttgatattcagactctgatgctcaagcgagccaccgtcaccggctcgaccatgcgcggccggacggcggcggagaaacagcagattgccgaggcgctgcgccgccacgtctggccgctgcttgaggcagggaaatgcaagccgctgatctacgccagctacccgatggcggagattgccgaggcccatgcctgtctggacagtggtcagcatctggggaaagtggtgatcacgatgacgtcgtgagacgcatcccggcgggctgccgccgggatggagttaggggaggttaaatcacgccctgggccagcatggcatctgcaaccttcacgaaaccggcgatattcgcgccgcgcacgtagttggtctgcttcgcttcgccgccgtactgcacgcaagcgtggtggatatccagcatgatgtgatgcagacgggcatccactttttccgctttccagcccatgcgcgcggcgttctgcgccatctccagaccggaagtcgccacgccgccggcgttggccgctttgcccggggcaaacagcacgccagcttccaggaacaggtcggttgcggcgatggtggtcggcatgttggcgccttccgccacggccttgacgccattggcaatcagctggcgggcggcatcgacgtccagttcgttctgggtcgcgcaaggcagggcaatatccaccggcactgaccacggctgctggccttcaagataggtgaggccaaattcgcgggcgtaatcggccacgcggccgtgggcacgctctttaatgtcgatcaggcgggccagtttttctttggtgaagcccgcttcgtcaacgacggtgccgttggagtcggaggccgtcaccacccgcgcgccaagctccatcgctttctcaatggcgtattgcgcgacgttgccggagccggagaccgccacgcgagcgccttcgaagccgaggccgtgacgtttgagcatcgcttcggtgaagtagatcaggccgtaaccagtggcttccggacggatcaagctgccgccaaaggagagtcctttaccggtgaagacgcaggcgctgttgttggagagcttgcgcatcattccggccataaagccgacttcgcgaccgccgacgccgatatcgcccgccggtacgtcggtatccgggccaaggtggcgatagagttcggtcatcagcgcctggcagaaacgcatcacttcgccatcgctcttgcctttaggatcgaaatcgctgccgcctttcccgccgcccatcggcagagtggtcagggcgtttttgaaggtctgctcgaagccaaggaatttgagaatcgacaggttaaccgacgggtgaaaacgcatcccgcctttatacgggccgatggccgagttgaactgcacgcgccacgcgcggttgacctggacctgattgcggtcgtccacccacaccacgcggaactggatcacgcgctccggttccaccagacgttccagcaaagcaagctgacgatagcgcggattttcctcaaggaaaggccacagggtggtcatcacctcccggacggcttgagcaaattcggtttgatgaggatcgcgctgttgaacgcgggtgagaaagccttccagagtgcacgtctgatccatagatatcagttccccttatggttgtggttgcatgtatttattatgattcggtccttgaaaaaaccgattttccgactataacaccgctaatccttaggcaagcaaggaaaaattgagccgacaacaaaatttataattgcccgctcgtcataactaaaagcgatgacgaggcggcgggcggatcagcggacggaaagggtggggcgctgggcgataaaggcgtgcagcagaggaatatcggccggggcgagatcgagggccagcgcttctgtgggaaggcaccagcgcagctgagtgtgatagtgggccagcggcgtgccctgaaagtgcggcacccaccaggcgtgcagatggacccggcggccggagacctcccgatgatggctagcgatatagcaagccgggcgggcgatgatgcccatctcctcctgcagttcgcgggccagcgcctgcggctggttttcacccggctccactttgccgccggcgaactcccacatccccggctggtcggcgtggggcggacgctgcgccagcagaatctggccatcctgttcaataatggcggcgacaacatcaatcatttttagcataagcattaaggttaataagacgaatatggcctattatcaccgccatagaccgtaactgacaaccgccaaccctgctggagaccttcgtgcttgatagccacctgcatccgcgccttaaacccctgcttaacgctgtcgccggcgcccttgaccgccccggcatctcaccggacgggctgacgctggttggttttgccatcggcgtgctggctctgccctttctggcgctggggtggtatggcgcggcgctggcggccattctccttaaccgcctgctggatggcctggacggcgctctggcgcggcggcgcgggctcacggacgcgggcggctttctcgatattgcgctggattttctcttttacgccctggtgccgttcggctttattctggcggatccgctgaacaatgccctggcgggcggctggctgctgtttgcctttatcggcaccggcagcagctttctcgcttttgccgccctggcggccaggcaccagatcgccaatcccggctacgcccataaatcgctgtactatctcgggggactgacggaggggacggagaccatcctgttgtttgtcctcggctgcctgtttccggcgcatttcgcctggctggcgtggctgtttggcgcgctgtgctggctgacgacggcgacgcgcatctgcagtggctaccagaccttaaagcgggtaacgaccacagcgtaaacggggtatcgcgcgtcgccgacaaagggcgacgcgctgaggcggggcgagttactgactgctttccgggccgcgctctccgcgggccaccggattgtgcgggttgctgctccattcgtaccagccgccgtcgtacaccgcgacgtgcggccagcccatggcgcgggcatacataaaggtttccgaggcccgccagccggtcccgcaatagaatgccacttgctggctcggcagaatgttccactggcgccacagggcagcgatatcgtcggcgctgcgcatggtgccgtccgggttatggaaatcctccatgtgcgtggagtcgctcccggcgtggccccagcgggccccagcgatgtcgcccttcggcttgatatagctgtagccgctggtggtgccgataaactccggccacgagcggacgctgaccagcgaggcgtcctgacgatgcagcagcccgcgggcttgttcggtatccagtatcagctgcggctggccggggatcggcgcgccgaaatcaggcgccggctgctgcgccggcggcataccgcgctctaccggcagcccggcgtcggaccaggtctgccagccgccgtcaagcaggcgcacgtctttgaccccggcgtacagcatgatctgcgccacccgcgctgcggcgtagacgtcgcgaccatagaggatcaccgtggtgtcatgccggatgccgtgcttcgccagcatcgccttcagctgcgcgtcggacactttattccacagcggttcgctctccacctcattggtatcgatatagcccgcgccagggatatggctcagcagatagagcttcggcgctccccaggcggcttcaaacactttccaatcgcctgccggggcggcggcgaccgctttcccttgctgtaggtcgtgcagccactgggggtagaccagctgttcaaagtgcggcagcttttgcagacggtcggtctggctcagcgcatcgctcagggtgctgagccgggtgaaacccgtttgtttcagccgcgccgcgacgctggcgttatcctccgggctgccgtacagcgcgatgggggtatcggactggagctggtgctgcttagcccaggcgcgcagctgatcgtcgctcatggcgccgagccagcaggcggaaagattgagggcctgcggctcatggccttccgggccgttggcgcgctgcggccagccgttgtaataagcgctcagccgggtgtcgatggccacgccgtgctgctgttgcaggtgggagagagtgagcgctggcatggtttcagcggcgcaggtagtggaagcagcaagccccatgagcagggcgagtgcggtcaattgagaaacacgtttcatcgaaatgcccgacggtaaaaagtggagggcgtattctccactcgccaggcgccgatttctttgcggtaacgcaggtttgcacactattgtccttcattgccagcgctccatcgccaggcagcgccccgtcggcgggcagtcctcgcgatcgtgggtcaccaggatcgccggaatggcctggcggtccagttcttcaaagacccagcggcggaacccggcgcgcaggctggcatccaggcggctgaagggctcatcaagcagtaatgcctcggggcgcgccagcagggcgcgcagcaggctcacccgcgcccgctgcccgccggagagcgtggccggatcgcgcggggcgaagcccgccagcccggcgcggctaagcgcttcctccaccgcggtttttcgcgcctcgccgcgcacgttctccggcagcgccagctgtaaattttgcccgacgctgaaatggtcgaacagtaacgggtcctgaaacagaatgccgatgcgccgatgctctgtcggcagcgtatcgcaacgccgttcgttgagccacagttcgcctcgggcgcgaaaatcgccggacagggcgccaatcatccaggcaaacagtgttgatttcccgctaccggaggggcccatcagcgtcagcacctcccccggggctaccgaaaaggcgacctcccgcagcagcggctggcgtctcacgctcagagtcagatggtttacggttagcactagcgaagtcctcgtcgatagcggcctgccagccaggccagcagagcggtcagggtaaagcataccgccggcagcaataattgccacagcgcctgagcggcgagcgtctgcgcctcgccgccgctgctgagcgccaccgcctggctggtgagcgtcggaattcggccagcccccagccatctgtcccttctacacatctgaccctgccgacgagcgacccagtctagaactaggggcgcgcggcagccataacacaaaaaaaacaagccgcataaaagcagaacgcaagagagaacagatga

SEQ ID NO: 209 - DNA, 10258 bp, Unknown
  source: /note="Description of Unknown: MKP2_2161_1 Mutant Bacteria sequence"
cacgcagataatggtacatttaatcgtcatcagggcgccgtccacaaacagcgggccgtactcctcgatgatctcccaacggaatcccgtcatagtccttccctaaaaaatacggctatcgcctgggcgatagccgtggtcactgaaaaaggtggattattgcgctggcagcgtcggcacgttgtcgtcgaaccaggttttatagattttggcgtaagtcccgtcagcaacgatcttttgcagcccggcgttgattttgcccagcagttcactgttgcctttcgccaccgcaataccgaaatactgacgctcaaatttggcatccggcaccagcttgaactgcttctccgggtgctgtttgatgtagtacttcaccaccccgacgtcgcctaccgcggcgctgacgccgtcctcaaacagctcctggagcatcagcggggtattgtcgaagcgcttgatcgcggtgctgtttttacccagcacctcagaaaccacgatatcgccggtgctggagttcaccaccccgaccttctcgtttttcagggccgccagtgaatccacctgcgagtcctgagcgacgacgatagactgttcggccgggaagtacggcgcggagaaatcgaccatctgtttgcgtttatcggtgatggtgatcccggagatgatgatgtcgcggtcgccggtgttcagcgtggcgaagatgccttcccatggggtattgaccagcttaacgtcaaagccttcggctttggcgatggctttgatgatgtcgatgtcgaaaccttccagctgtttctggctgttttcaaattcaaacggccggtaggtgccgccggagccgacggtataggtttccgcagccgcctgtccggcagccgtcagcgcggctatcatgcaacacgctttgagcaaattcttgaccatgagatttcctttttatgcatttattttgcataaaaatacacacactcacttttatatgcaaccggaaaccttcccgctggtgaattatcttctcaatggccccgtttaccgccggatttaccgatagcccgatgcagatcgttgattcgtttcagggatttcaccgttttttgtggcgtggtagaggccaccgacaggacaattatctcgagacagaccagcaccgtaccgtgcagcggcatccggctactgtccccgccgcgcgggacgtcgatcaccacctgcgcctcctggctgaagcgcgagtccaccgcctgggtcagcaggatggtcggaatacccagccgcttcgcctcgcgcagggtggtcaacccttcgcgatggggggatttttgccccatcatgatcagcacatcgccgcgctgcaggccgataagctgttcggcaaggctaaagcccgtgcggttcatcacgtacgccggcaggccaatacggctgaacaaccgggcggtgtattcggcgaggatccccgaggcgccgataccgaagatccccacctggcgcgcgtcgctgagcaataccaccgcctgagccaccgccgcgcggttgtcggcccgcgacaggacctcgcatacccgctgatggccttcaagcacaaaatcaatactggagttgacgtcgctggagagcgcggtaaccgtcgagcgcatcttttccgccgaggtgaccgaggtgccgaaccagcgctccatggtctgcttaagctcgcgcagcccggcgaagcccagcgcctggatggcacgcaccaccgtggcgtcggaggtctgggtcgcggtggcgatctccatcgccgtatgctccagcaccacctcgcggttgtcgttgatatagctgaccaccgcccgcagccggggggagagctggtgcgcccgggcgcgatagcgttcgccgaacagatcgactttgcccttctctttttttaccgcgcttttcatttggcctccgccgggatcggcctgccggcaatatgcgactgcacctgggccaccatcagggacagcgcggcgtaggagttagagatcacctcttcccgcggcagcaaaatatagtgcccggtgcggcaggcgcgcataaagtcgcaccagccgggcatcacgccttccatcgcctgcagctcatcctgcggcttaccgccggtatccgaccgccaggtggcgaagacaaaatcagcgtctagctccggcagctgttccgcgctgacgtcaatgcgctgaccatcggggatccgctcaatcagcggcggaaagcggaacccggcgtcgcgcagcacccggcccagcgcatgatacgaatgatgcaccgtgaccttgccgttgttcgcctggatcactgagacgctgtactgcggtgggttgaccatcgctttcagctgcttgatttgctcctgatagcggcgctcgaggatcgccagccgcggctgggtgccggtcagctgcgccagcttgcggtaaatctccggggcgctgccctgcagatggtcgatgctcaccgtcggggcaatcttctccagttgctctaccgacacatggcggctgggctcagtgatgattagatccggcctggcggcggctaccgcttccagatcgatatcggcggtgccaataaagcggatatcgctgttgtcgatatcgacgccggtgagctgggcgctggatcgcaggtagtggctgccgtccgggcgcgtccggccgtggctggcgatcggcggcgccccgagctcaatcagcggaatggtaatgtcgagatcgtgcatcgaaacgatacgctgcggatgcagcggcacggtgaccgtgcggcctaaatcatcggtgaaagtttgagtttgtggggcggcggcgctgacggcccccgtcagcaacagcagcaatgagacgaaccaacgcatactaccttcctggttaaagggcatcacggcgacgccagagcaagataacgaagaacgggcaccccaccagggcaatgacaatccccgccgggatctgcagcggggcaaacgccagccggccaagggtatcggtcgccagcaccagcaaggcgccaatcagcgcgctgccccacagcagcgatacctggccgccgcgcagcacaaaacgcgccatatgcggcgccatcaggcccacaaaacccaggctgccgacgcaggagacgctggccgaggtcagcagcaccggcgcaaaaaagcgcagcaccgtcagctgctgcagacgtacgccgaggccgatggcggtccggtcgcccagcagcgccacgtccgccgcccgggcggtacagaacaggatgatggccccgggcagcgcccagcaaaaagccaccgccagcagcggccaggtggcggcctgcaggctgcccgccagccagatcatcgccgtctgcacgtcgcgtacgtcggcggtggtcataaagatgccgaccgcggccgccaggctccaggagacgccgatgccaattaaaataaagcgcggccgcgaacagtcgcgggccagcgtcaggaccagcagggccaccgctatgccgccgaccatccccgccagcggccgccagaccaggcctaccgccgggaaaaacagcaccagcgccagaaccacgatgcttgccccctctttgacgccgatcagccccgggtcggccagcccgttacgggtgatgctctgcatcgccgcgccggccagccccagcatggccccgcacagcagcgccatcaggatccgcggcaggcggatatcaaacagaataaagcgcggctgctcgcccatctcctggggcgccagcagggctcgcgccagcgtcgacgcgggcagcggatagctgccgcggctaaggctgtacagccccagcgccagcagcgtcagcactatgctggcggcaatttttaacgccgcaggacgcagcagcagatgacgggaggcgaaagccagcggccgaaaaccggcccggtgaacggcgcgcgtcatttaaaaaacctcgcggcgataaagataaacaacggcgcgcccaccagggcggtcatcgctccggtggccagctcctgcggcgcgaccagcgtccgggcggcgatatccgccagcaccagcgccagcgctcccaccggcgcggccaggggcagcgccaggcggatgtcttccgtcaccagacggcgcaccatgtgcggcaccaccagcccgacgaagccgatcggcccggccaccgccaccgccgcgccgcacagcagcgcaatcgccagcaggcccagcagccgggtctggacgagattaacgccaaggcccagcgccaccttatcccccagcgccagcacgttgaggcgtggggcaatgagcagcgcgacgccaaggccgatcagcgctggaaccagcgccgtctgcagcgtgctccagttcagtccggccaggtcgccggccagccaggtgcgcatcgccagcagcgtctgttcatcgagaattaatatcgccgccgtcaccgccgacgcaaaccctgacagcgccactccgcacaatgtgatgcgcagcggcgtcgccccgccgcgcccggcagaggccagcgccatcacgccaccgaacagcagccccgcgccgcaggcggcggtcagcgggcgcccggcggggaaagcgccgaaggacaggcccagcgccgaggtcgccaccaccgccagcgaggcgccggcgttaagcccgagaatatgcggctcgccaagcgggttacggatcaccgtctgcagcagcagcccggcgacgccgagcgccgcgccggtcagcagcgccgccgccagccgcaccagacgcagatcgacgataatccgctgctcaaagttacgcggatcgtactccagcagcgctcgcagcaccgtctgcggggcgatccagcgggcgcctaagccaagatgcaccagcgaggcggcgataagcagcagcgttagcagaagcagcgccagcagggggcggtggcgacgccgcgcggaaagcaggatggccacgctcattgtgccgctgcctggcggtcgcgaaacggcataaagaagggtttgccggtttgcgggttgatcgacatctgcacgtcaacgtcaaacacgcgtttaatcagctcagggctacagacatcgttgtcgctaatcgtgccggcgatgcgcccctgtttaaggaataccagcagatcggcgtagttcaccgcaaagttaaggtcatggagcactgtcaccaccgtgcggccatgttcgcgggtgagggtctggagcagctcaaggatatcgacctgatagcgcagatcgagccaggtggtcggctcatcgagcagaatggtggccgtttgctgggccagcgccatggcgatccagcagcgctgacgctggccgccggagaggctgtccaccggcagatgggcgaattcggcggtaccggttaagcgcagcgcctcctctaccgccagctcatcggcctcggaccactggcgcatcagcccctgccacgggtagcgcccgcgcgagaccagctcgaaaacggtcaatccttccggggtcaacggcgattgcgggaggatgcccagctggcgcgagacggctttcgtcggcatctggtgaatggcttgcccgtccagacgcacgcagccgccgagcggtttcagcattctggcgatggtcgagagcagcgtggatttgccggatccgttcgccccggccagcaccgtcattttgccggtgggaatggtcaggttgatatcgtcaacgatcagggtctggccgtagccggccgacagggcatccagtacgatcccctgctctgcaggtttcacccgctgtggcataactcgctcctgcgccgcagcgttccagacgatagctggacattctgcagttaaatcaaaataaatctcattctcttttgatcatgacggggatgaatgtagtagtcaatactcgccatcgtcttcagacggggacgctgactacagcgaggctgtgccaacgcaatataatttaaataaaataatatcagatagataactacagaacattccctactggaggtgtttaaaacgtcctgttcctcgccgctgaatttttatcttgcataacgtttactactacatcccttcatgattgaatgattctcaattacacatctgaaggcgcattcagacgctaaacagagtgcttttattattcagggcaatgattttattggcttaatctgaccgcaaaggcagattcgttcacgagaaacagataatgactcaaccccatgtcgcctgcaggacgttgccagggcgcgcgcttttttcgcttctttttttagcctcaccgggattaatggccgccgacaatcgcgcggcgaaaagtactaacgacgcggaagagactatcaccgtagtggccgacggcgcgcagcaaagcgccaccagcggctatcagccgctcagctccgccaccgcgacgctaacctcgatgccgctgttggatattccccaggtggtcaataccgtcagcgatcgggttctcgaagatcagcacgccacctcactcgatgaggcgctgtataacgtcgctaacgtggtgcagaccaacaccctcggcggtacccaggacgcctttacccgccgcggcttcggcgccaaccgcgacggctcgatcatgaccaacggcctgcgcaccgtgctgccgcgcagctttaacgccgccaccgaacgggtggaagtcctgaaggggcccgcctcgacgctgtacggtatcctcgaccccggcgggctgatcaacgtcatcactaaacggccggagcggcagttctccggttcggtttccgggacctccaccagctttggcggcggcaccggcagtttcgacgtcaccggccccatcgaaggcacaaatctggcgtaccgactgatcggcgaatatcagaatgaggattactggcgcaatttcggtaaaaacaaaagcagctttatcgccccttccctgacctggtttggcgagcgggcaacggtgaccgcgtcctattcgcaccgcgactacagcgcgccctttgatcgcggcactatcttcgatctgaataccggccatgcggtgaacgtcgatcgcaaaacccgcttcgatgaagcgtttaatattaccgatggctattccgatctcgctcagctcaacgccgagtatcgccttaacgacgcctggaccgcgcgcttcgattacagctacagccaggatcactataacgataaccaggcgcgggtgatggcctatgattcggcgaccggcaacctcacccgccgggtcgatggtacccacggttcaacgcagaagatgcactccacccgcgccgacctgcagggcaacgtggtagtgggcggcttttataacgagctgctgaccggcgtcgcctatgagaattacgatctgctgcgcaccgatatgctgcgctgtaagaacgttaaaggctttaacatctatcatccggtctacggcactctcgacacctgtaataccgtctccgcctccgacagcgaccagcgcattcagcaggagagctatgccgcatacgtgcaggacgcgctgtacctgaccgacaactggatcgccgtcgccggcgtgcgctaccagtactacacccagtacgccggtaaaggccgaccgtttaacgtcaataccgacagccgcgacgagaattggacgccgaaagccggcctggtctacaaggtcacgccgaacgtctctctgttcgccaacgtcgcccagtcgtttatgccgcagtcgtcgatcgccagctatatcggcgagctgccgccggaagagtccacctcttacgaagtgggcgccaaatttgacctgttaaacggcattaccgccaatatcgcgctgtttgatattcataagcgtaacgtgctgtacaccgagagcattggcgatgagacggtggccaaaacggcgggcaaagtgcgttcccagggcgtggaagtggatctggcggggtccatcaccgataacctcagcgtgatcgccagctacggctacaccgacgccaaagtgctggaagatccggattacgccgggaaaccgctgccaaacgtaccgaaacataccggttcgctgttcctgacctatgatattcataacgtctataacagcaataccctgaccgtcggcggcggcggccatgcggtcagcaagcgttccggcaccaacggcgcggattattatctgcaggggtatgcggtggcggatgtgtttgccgcctataagatgaagctgcagtatccggtgacgctgcaggtgaatgtgaagaacctgtttgataagacctattacacttcctcgatcggcaccaataacctcggcaaccagattggcgacccgcgcgaagtgcagttcacggtgaagatggatttttaagccggaccatggcgtcgcgccggatattcattgccgggcggcgctgcgcttgcaccggcctacctttccgtgacatttgtcgcagttcgtaggcccggcaaggcgcagccgccaccgggcaaaaacaggcgtctggcaccggatgcccattgccgggcggcgctgcgcttgcgccggcctagtttccgtgacatttgtcgcagttcgtaggctcggtaaggcgcagccgccaccgggcaaaaacaggcgcctggcgccggatgcccattgccgggcggcgctgcgcttgcgccggcctacctttccgtgacatttgtcgcagttcgtaggcccggtaaggcgcagccgccaccgggcaaaaacaggcgcctggcgccggatgcccattgccgggcggcgctgcgcttgcgccggcctacctttccgtgacatttgtcgcagcgccaccggggaatgcgttcagcttaccagtccgcctcctggccgaggatgcgcaatatatcctgacgatgctgcagcagctgcgggttatcgcgatgacggggaaaagccagcggcagcgcaaactcggcgataatccgccctggacgcggcgacatcaccagcacccgctcgcacagcagcagcgcctcttcgatatcgtgggtcaccagcaggctggtatacccctgctgctgccagagggcgatcagctcccgctgcatactgatgcgggtcagcgaatcgagtttgcccaacggctcgtcgagcagcagcagacgcggttcgttcaacaaggcgcgcgccagcgccgcacgctgtgccatccctccggacagctgccgcggccacgcctcgctgaaggcctgcagcccgatgcggtcaatcagcgcgtctgccttcgcctccagcccctttttgccctgcgcctgcgggcccagcagcacgttctgccgcaccgtcagccacggatagagcgtcggatcctgaaacacaaggatccgctccggccccggggcgccgggcgccgcgccgtcgatctgcatctgtccgctctgcggcgcttccagccccgccagcagccgcagcagagttgatttaccgcagccggaagggcccagcagcgccacgctttcccccgggcgcagctgcaggctaatattctccagcaccggtaccgtctgtttgccaagcgtaaacgcatgatgaagatggctgatggataccgccgcgccgcgcgctatcgtctcggttaccattgcatccctcctcgctgccagctcagcagccggtcacgcagcataaataatccgcttatcaggccggagcataacaaggccatcaccagcagcgcggcatacatattcggataggccgcccagccctgggcccactggaggtaaaagccgatccccgacttcaccccgaccatttcggcgacaatcagcaccgaaaacgacgcgccgagccccataaacaggccgacaaagacgttcggcaacgcggcggggatcgccacccgcaggatcaggaaacgctggctggcgccgagggtccgcgccacgtcgtaccacgccttatcaatgcccatcactccggaccaggtcagcaccgtgaccgggaaccaggtgctcagcgcgatcaaaaacacgctggcgccgaagctcgagggaaaaataaacaggcacagcggcagcagcgcggtggacggcaccggccccagcagacgtaacaccggatgcacccagtagccaatcagttgcgaccagccgaacgacagaccggccgtcaacccgccgctggtacccagcagcacacccagccccagccgccaccgggcgtgcagcaggctctcgagccagcgcgcccagccgccagcgagcacccccgcgcgcgccgccggacgccccaaccacgggccccgcc

SEQ ID NO: 210 - DNA, 10157 bp, Unknown
  source: /note="Description of Unknown: MKP2_2161_1 Mutant Bacteria sequence"
gtgcggggggccggggggcggcgtgcgcgtgcgcggagcgcgggggtgtgcgcggggttgcgccggcggcgggggacgcggggcgccgcggcgctggcggcgcacggcggcagtcccctggcggcgacgctgcgcgggctgcgggtcagtcggatcgctgtccatcccacccgccagcgggaaggcctggggcggaagatgatcgccgatatcgccgccgatgccgctggctatgactatctctccgtcagcttcggctataccgctgagctgtggcgcttctggcaacgctgcgggtttaccctcgtacggctgggtacccatcgcgaggccagcagcggctgctatacggcgatggccctctatccgttgaccgcggcagggcgccagctggcgcagcgggaggcgcagcggctgcagcgcgatgaatactggcttcgcccgtggcgagaggaatccgcgccgctgccggccgtcgcagacgctatgcttagtgatgaggactggctggaagcggcgagctttgccttcgcccaccgcccgctggccgcggcgctgggctgcctcaaccgcctactgatgcaggccgacatgccgttgccggccctgcggggacgactgcagggcaaagaggaggccgcactctgcgccgtgctgcagctgacggggcgtaaagccttgcaggcgagatggcgtcgggaggccgctgacgccttgcgcttccttgatgcagcgcgcgctgatgcgctgcgtcagcaggtggcgcatctgcaatttttttaactaactcattcagttaaatggcatggtcatatctggcgagcggcgtacactgcccgcaaacactaaggagacagccatgaaacacgatcattttattgttcaaagtcctgcgacgcctgcgcaacagctgttgctgctgtttcatggcgtaggggataacccggtctccatggggcaaatcggcagctggttcgcgccgcagtttcccgatgcgctgatcgtcagtatcggcggggtggaaccttgcggccccaacggtcggcagtggttttcactgcagggggtgacggaagagaatcgtcagcagcgcatcgacgccattatgccgacctttattgaaattgtacgctactggcaggaaaagagcggcgtcagtccacttgccaccgcgctgatcggtttctctcagggggcgattatgtcgctggagagtatcaaagcggcgccggatctggcttcgcgggtcatcgcctttaatggccgctatgcgacgctgccggagacggcaacgacggccactaccattcacctgatccacggtggtgaagatcgggttatcgacctggcgtgggcggtgtcggccgaggaggcgttacagcaggcgggcggcgacgtgaccttagatattgtcgacgatctcgggcatgccattgacgatcgcagtatgcagttggcgatcgagcgtctgcgttataccgtgccgaagcactattttgatgaggcgctgagcggcagtacgccaaaaggggatgatatcatcgaaatgctgtaaccccggagagcggggttacaggcgggcggtaccgcgataaaggcaaacttacggttttttcgactggtcgtgcttcggccagtcgtcgtcgtcgtcccatttatcgttaaaatcacggtgcggcggcagatcgggtttgttgttgaggaattttttgtggtcaacgcgatttagatctttaatcacgttgataattacccccaccaaaaagaccagcaccagaatccaccagtgtttaataagccattccatgcgcgcttcctctttacgtcaattcgtcaggcgaccagctgttccatgacgcgttgatacatccgcgccagcagctgcaggtcggcggcgttcacacattcattaattttgtgaatcgttgcgtttacggggcccagctcaaccacctgcgcccccatgcgcgcgataaaccgtccgtctgaggtgccgccgttggttaacagctgcggtttgatctcattatagtgctcaatcgcgttgacgaccgcatccaccagcttgccccgtccggtgaggaacggctggccggagagccaccactccacgctgtaacgcagctggtatttttccagcagggcgatcacccgggatttgatcatctcgtccgtcagctccgtactgaagcggaagttgaactggacgaacatatcgccggggatcacgttattgctgccggtgccggactgcacgttggcgatctgcatgctggtcggcgggaagaactcattgcctttatcccactcgatattgaccagttccgccagcatcggtgccgcgaggtggacagggttatcggcaaggtgcggataggcgacatgcccctgcacgccgtgaatagtcaggttgcaggtcagcgagccgcggcggccgtttttcaccacatcgccgaccacttcggtactggaaggttcgccgaccagacaatagtccagacgctcgttacgcgccatcagcgtctccaccactttgacggtgccgtttttggcgctggcctcttcatcagaggtgatcaaaaacgccagtcggcccctgtggttcgggtactgcgcgacaaaacgctctgcggcaaccaccatcgccgccagcgagcctttcatatccgccgctccgcggccaaacagcatcccgtcgcggatggtcggttcgaacgggggattgatccagcggtcggcgtcgcctgccgggactacgtcggtgtggccggcgaaggccagcgtctcgccgtggccgcgccaggcccagaaattctgcgtatcgccgaaatccatcggttcaacggtaaagccgatcgcacgcaggcgttcaatcattaacgcctggcatcccgcatcatcggggctaagggaagggcggcgaataagctgctgagccagctcaatgaccgggcaagacatagactatacctcgttaaactgctgataacttgcttcactaaaacccagcagcataggacgaccgggcgcgcagagcaatgggcgtttgataattgccggcatttccagcatcaatgcggctgcggcgtcggcattatcgatgctattgcgcagcgactcgtcaagtttgcgccaggtggtgccacgggtgttcagcagcgcctgccagcccagctcggcaataaaggtatccagttgcgcacgctcaaggccatcggcgcggtaatcatggaagcgatactcaatccgatgcgcttccagccagcggcgggcttttttaatggtatcgcagtttttaattccgtacatggtgagcatagataaaccttttacattcaattaagcggttaactcagatatttccgaatatataagtcttactgaaataatacgtgattcagatgaataaatataactttttaccggggatctcattcgatatatcgggtggttaaatgttggccacctgtgggcatgatgtgagggctttaacattattgcaaaaatgttgtctgaggttgctctacgtcacattatgtttacatacgaagcggcatagtagcgacaaccagaggttttatctctgtcagcggtccataagacaatcagagcaataggggagcacaacttcccatcggtaatgaagttatatagaatcgaccataataataagagaggctattatgattgaacatgaattggggaactggaaagactttattgaaggcatgcttcgtaaataaatttccgcaatgtgagcaggggaataacgcgaagtaaataagcgcgctagggttctgaacacataaagaaggcgaccaccgtggtcgccttttctgttattacgcctcgccgccgaagctcgtcggtttattgcggacgctcctttagcggaaaacggcgacgcaccagcacaaagaacagcggcacgaaaaagatcgccagcacggtggcggagatcatcccgcccatcactccggtgccgaccgcatgctggctgccggaaccggcgccggtgctggtcgccatcggcagcacgccgaagatgaacgccagcgaggtcatcaggatggggcgcaggcgctgacggcaagccgacagcgtggcgctgagcagatcctggcccttctcgttgagctcattggcgaactcgacgatcagaatggcgtttttcgccgacaggccgatcaccgtcaacagacccacctggaagtacacgtcattctccagcccgcgcatccaggtcgccagcagggcgccaatcacccccagcggcaccaccagcatcaccgagaacggcaccgaccagctctcgtacagcgccgccaggcacaggaacaccaccagcagagaaatcgcgtacagggccggcgcctgagcgccagagaggcgttcctggtaggacatggcggtccattcgaggccaaagccggtgggtaactgcgcggccagcttctccatcatgtccatcgcggtaccggtactgatacccggcgccgcctcaccgacgatctccaccgctgagtagccattgtagcgctccagccgcggcgagccggtctcccagcgcgaggtggcgaaggccgagaatggcaccatcgtgccgctgctattgcgcacgtaccaaagattgatatcgtcaggcagcatccggtatttcgccgccgcctggacgtagactttctttacccggccgcgatccataaagtcgttgacgtagctcgacccccacgcggtttgcagcgtatcgttgatgtcgtcaatggagacgcccagcgcctgcgctttacgctgatcgatatcgacctgcagctgcggactgtcatcgagcccgttatgccggacgcgggtcaacagcggatttttcccggccagctcaagtagcgtatcgcgcgccgccatcagcgcatcgtgccccttcccggcatgatcctccagctccatatcgaagcctgccgaactgccgaggccgctgatcgccggcgggctgctggcgataacccgcgcttcgttaatctgattaaacgctttggtggcgcgttcaataatggcaaaggaggtgccggtttgcgggtcgcgctggtcccagtctttgagacgaacgaacatacgggccacgttctgcccattgccgccggggccggagccaacggtagcgaacaccgactcgacgttctgcttctcgttattgaggaagtaatcttccgccttctgcaccaccttcagcgtctgctgctgggtgctgccgctcggcaactggaccgaggtggtgaacatcccgcgatcctccagcggcaggaacgaggtcggcaaatgcagaaacaggaacaccatcccgccgagcaggacgacgtagatcagcatccagcgcagcgagcggtgcagtattttgccgacgaaggtttcgtagcggctggcgctgcggttgaaggtgcggttgaaccagccgaagaagccttttctttcatgggattcacctggcttaacaggcttaagcagcgtggcgcaaagggcaggggtgaggatcatggccaccagcaccgagaggaccatcgccgcgacgatagtgattgagaactggcgatagatggcgccggtggtgccgccgaagaaggccatcggcacgaataccgccgacagcaccatcgcgatccccaccagcgcgccctgaatttgtcccatcgatttgcgggtcgcctcgcgtggcgacaggccctcctcgctcatgatgcgctcgacgttctccaccaccacgatggcgtcatccaccagcaggccgatcgccaacaccatcgcgaacatcgtcagggtgttgatgctgtagccacaggcatacagcaccgcgaaagtgcccatcagcaccaccggcacggcgatggtcgggatcagggtggcgcggaagttctgcaggaacagatacatcacgaggaagaccagcaggatcgcctccagcagggttttcaccacgtcggtgatggaagccttcacgaaggaggtggtctcgtaggcgaccttatattccagaccgtgggggaaaaactgcgccagctcattgaggcgattgatcacgcgctccgcggtggccatttcgttggcgccggaagccagcttgatcccgaggcctgaggccggctggcggttgtagcggctaagatagtcgtacttctccgcccccatttcgacggtggcgacatcgcccagcgtcacctctgaaccatcctgattgacgcgcagagtgatattgcggaactgctccggggtttgcagcagagattgcgagttgatggtggcgttcagcgcttgcttatcgaccgaaggcgtcccgccaagctggccaacggcaatctgggcgttctgcgaactgatggcgtcggtaacatccttggtggtcatctggtagctgttgagcttcgccgggtcgagccagatgcgcattgagtattgcgaaccgtaggcgtcgatatcccccacgccgttgacgcggctgagcgggtcctggatgttactggcgacgtagtcggcgatatcttgtttatccatactgccgtcagtggagacgaaggcgagcgtcaggatattggtatcaccggtcttgcgtaccgtcaccccttggttttgcaccgcctgcggcagcttacgcatcgccgactgtagctggttctgaacctgctgcacggcttcatccgggtcggtaccggcggtaaagctgagggtgatcgtcgcctggccggtggcgctgctctgggaggacatatacatcaggttatcgaggccggtcatattctgttcgataacctgagtgacggtattctccagggtttgcgcggaagcgccgggatagttggcggtgatccgcacattcggcggggcgaggtcgggatactgttcaaccggcagcgacaaaatggcaagggtgcccgtcaggcataacaggattgccagcacccatgcaaaaatggggcgatcgataaagaaattcgccatcagaataaaaacctcatatgcacattttcttgttattgcacagcctgtgccactttagcgccagcctctccggcaatcgtggagaaattaaggagatagtgtaatttatcatgttgcttttgccgtatcgtaaagaaacctcgagctttcctgccagcaggtagcgagtctgcttcgtcaccgcagaccggcgcattatcccttgccggtgtgaaacctcatttcatttaagtcaaaaaaattgatccaaaacggattctctccagaaaaagtttatcctgggcaattggacattgttccggcgtcatcttgtcgggtaataaataggcatgcgcattgaggggttattcaccaagaagacaaaaggaagccatgaaccactttattttgagcgatagccgaaagtgcatcggctgccaggcctgcgaagtggcctgcgtgatggcgcataacgaggagcaacacgtgctgaccccgcagcgctttttgccacgtatcaccgtgatcaaagcggagggccagcgtaacgccatcacctgccgccactgcgaggacgccccctgcgtccgcagttgtcccaacgacgccatcgcccagtccggcgacagcgttcaggtccgtcaggagaaatgcattggctgtaaatcctgcatggtggcctgcccgttcggggtgatgcaggtggtggtgacgccgcaggccgcaggcctggtgaaagccagcgcgcacaagtgcgatctatgccagggccgcgaggcggggccggcctgtgtggaaaactgtcccgcgcaggcgctgaccctcgccgacgatgagacgttgatcaccctggcgaagcagcggcgactgcgctcggcatgccaggaggtgcagccgtggcagcgcgctacgccgctctgcagccagcccaatgctggcgcgaaggtcaggcaaatggcgatgacgcccccgcgcggggagccggataagctggcggcggaggtgcgtaagagccactttgaggagatctatcagccgttcaccccgcagcaggcgcagcagcaggccgcccgctgtctcacgtgtggggagcacagtatttgcgaatggacctgcccgctgcataaccatatcccgcagtggattgagctggttaaagcggggaatatcgccgccgcggtcgcgctttcccatcagaccaactgcctgccggagatcactggccgcgtctgtccccaggaccggctgtgtgaaggcgcctgcaccctgcgcgatgaaagcggggcagtcaccatcggcaatattgagcgctatatttccgaccaggcgctggccagcggctggcgtccggacctttcgcaggtgaagccgagcggcaagcgggtggcgattatcggcgccgggccggccgggctggcctgcgccgatatgctggtgcgccacggcgtccagccggtggtcttcgaccgtcatccggagattggcggtctgctgaccttcggcattccggcgttcaagctggataaatcgctattggcccggcggcgggcgatcttcagcgagatgggtatccgctttgagctcaattgcgaggtggggaaagatatctccatggcgacactgctggccgagtatgacgcggtgttcgtcggcgccggaacctatcgctccatgaaggctgggctgccgaacgaagaggcccccggggtctacgatgcgctgccgttcctcatcgccaacaccaaacaggtgatggggctggcggcatcggcgcaagagccttatgtcaacaccgccgggctgaacgtggtggtgctgggcggcggcgatacggcgatggactgcgtgcgcaccgcgctgcgccacggcgcccgccaggtgacctgcgcctatcggcgagatgaagccaacatgccgggctcgaaaaaagaggtcaaaaacgcccgcgaagagggggcgctctttgagtttaacgtccaaccggtgacgcttgagctggacgagaacgggcgggttaacggggttcgctttttgcgcaccgagctgggcgctccggacgccgggggaagacgccgtccgacgccgatccccggcagcgagtttgttatgccggcagatgcggtgatcatggcctttggcttccacccgcaccgcatgccctggctggaagcggcgggggtggcgctggacagccaggggcgtattaaagccggagtggagagccgttaccgttatcagaccagtcaggagaagatctttgccggcggcgatgccgtgcgcggcgcagaccttgtagtgacggcgatggcggaaggccgtcacgcggcgcaggggatcctggactatctggcgcggaaaacgacgccgcttcactgacgacaaacccggctccgcagcgtagtatgagggcgtccttttacgctgtggggtcggtatgtcactcaatattcacgtcattaaagataaaatcctctctgagaactggttcgtactacgcaacatgacctatgagctgacgcgggcggacggcagcgtcgtgcgccacaagcgcgaggtctacgatcgcggcaatggcgccaccgtgctgctgtataaccgccataagcagacggtggtcctggtgcgtcagttccgtgtcgccacctgggtcaatggcaatcatgacggcatgctgattgaaacctgcgccgggctgctggacaacgacgagccggaagcctgcattcgtaaagaggcggtggaagagaccggctacgaagtgggcgaggtgagaaagctgtttgagctgtttatgtcgccagggggcgtcaccgaggtagtgcatttctttatcgccgagtacagcgacgcgcagcgaaccaccagcggcggcggggtggatgatgaagccatcgaggtgctggagctgccttttagccaggcgctgcagatggtcgctgacggggagatccgcgacggtaaggcggtcattctgctgcaatatctgcaaacctccggcctgatgtcggggaactctgacaaatccgattgagtaacccgctgccgttgtccaggataggcgccgtggtcggggttctctgctggccactatacacatcggcagctgcagaccagggagatatacaaaggttagggtgtagcagtagcatgagaaaagagcaagagagggagcgcatgccaaaggacggagcgag

SEQ ID NO: 211 - DNA, 9633 bp, Unknown
  source: /note="Description of Unknown: MKP2_2161_1 Mutant Bacteria sequence"
gggtattgagaaagcggcccatcgcctcacccagcagccgggtgcgttgaaaacccggcagcggcgcggcgacgccgttaataaacaccggcagcaccggcacgcggtccaggccacccagcagaaactccagcggctgggcgaagccatggtccacctgcatgttgtacgacaccgccaggtcgataccgctgttgatcacggcgtgggcgcaggcttccgccagctcggcgggcaccggcaggtcgccggcggcgctggcgaagtcgccaatcgcagtggcgccgacgccgaggcagaacggcggcatcacgtcatagaaaaaaccgttgtagtgatcgggggcgaagagcaccaccagctcgggatcgaattcagcaatccaccgccgggcgtcggcaatcaccccgttcacttcatcgaggaccgcctgctccgggtccacgaatcccaccagcggagtgtgggagagacagtgcaaataggcatgcatatcaggccaccttctcttcagcgtgggcggtatccccggttgcgagggccattttttccgccagagcggtcagctgcgcgccgagggtttgcgggatggcgagagcggcgacaaagcggtccggcctgaccacggcgatggcggtgttatgcagtgcaaaccagcttttgaggcggttttgcgtatcgcccacccgcagcgtgccgggggcgttatcctgctcgcgatggatctgcacctcgggcaccacctggataaagcgcacgccaatcgcgcgccagcgggcgatctgcccggcgtcgagcccccactgcgggttgcagccccagccgataatggcgaaattcgcgccgatgacgtcgtcgagcagcacgctctcgccgctctccagcgtcacctgcggttgaataaacattttgcccaccggcgaggttttgctggcgccgtcggtcagcagcgccccctcgcggtactgcggcatcggcttaaagcgcatttcgaggaagtagcgcttcaccggcggcaggtagttcagcagccaggagaggccgtcgcgcgcggccccctgccagcgcttcggcggcgccagcacatggccggcggtaaccgacaggtcaatcatcgctttcgcgtggtcgcggcgctcctgctggtagctgtcgagcagcgtctctcccgctttgccattgaccaccagcgccagcttccacgccaggttgaaggcgtcgcgcatgccgctgttatatccctgcccctgccagaccggcatgatgtgcgccgcatcgccagccagcagcacgcggtcgatgcgaaagcgctcggcaaggcgggcgttatgcgtatagacccgctggcggatcagctcgacgcgatccgggtccggcagcactttgctcagcaggcggcgcatattgtgcggttcgctgagctgagcttcggtttcgccgggcatcaccataaattcaaagcggcgcacgccgtggggcagcgcggcggaaacgtagggtcgcaccgggtcgcagcacaggtaaacgtgcggggtggccagcgggtcgttagcgatatcgatgacgatccactgattcggcgcggttttaccttcgaaggggatgttcagcgtacggcgaataaagctggcgccgccgtcgcaggccaccagccagtccgcgcgcaccgtctcccgctcgccgtccggtcctttaagatttaacgtgacaccgtcaccggtctggctaaaggcttccacttcgcgggagaagaggcagcggacctgcgggaaacgctgcagaccgtgatacatcaccgcatcgacctgcggctgaatgaaggcgttgcgccgcgaccagccaaattcatcggtcatcggctggatatcggcaaagcagcggccttttggggtgagaaaacgcatggcgtgccacggcgtggtatgcggcagcacgtcattcaccagccccaccgcctgcatcgcccgcagggattcatcgtcaatgccgatggcccgcgggtaatcgatcagtgtggcgagcttttccaccaccagcacgctgatgcccatctggccaaagtagttggccatcatcagaccaaccggaccggcgccaacgatggcgacctgagcggtatgctgcacggcgggttgaatatcgggtgtagatgttgtcattctcagcgacctcacgactcggaaactgcccggctgacaggcaatttgttaatcatgtgtaaacgtatttttataatgggctgagtatagggcgggggttttcggctacaatcaaaacatcatcgaatgtgcaccaggtgcacaacgctgtttttaaagcattttaatggaggatttatgcgtgacgatgggtccgcagcgtacaaaacggtgcgcggattaagccggggtttattgttattaaaattgttaaataaattcgacggcggcgcgacgccgggcctgctggcggagtttagcggcctgcatcgcaccaccgtgcgccggctgctggagacgctacaggaggagggttttgtccgccgcagccgctccgatgacagcttccggttgaccattaacgtccgccagctgagcgatggatttcgtgacgaacattggatttctgccctcgccacgccgctgctcggcgagctgctgcgcgaggtgcagtggccaacggacatcaccaccctcgacgtcgacgccatggtggtgcgcgagactacccaccgcttcagccgactgtcgtttcaccgcgcgatggtcggacggcggctgccgctgctgctcaccgcctccggactgacgtggctggcctttgcccccgacgcggaacgcgacgccatcgtcagcatgctggccgcccgtccggaagctgagtatcagctggcccgcgaaccggaacggctggcggcgatcctcgcccgcacccgccagaacggctatggcgaaaacttccgcggctggcggcaggaggagaaaatcgcctcgatcgccgtgccggtctgcagtcagctgcgggttatcggctgcctgaacctggtctatatcgccagcgcaatgaccattgagcaggcggcgcagaagcatctccctgcgctgcagagggtggcgggacagatagaagcccgcatggaggatgaagaagtgtggtacgaaatgccctgatcgcgatgagggtaaccgcgatcaaccattgcgcccggcttcgttatataatttaatacacaacgaattttcacgccattcgggccacaccatgtcaaaacaccccttactgctgggcctgacgctgctcagcgccagcctgttcaccggccaggccttcgccgaccgcaccgtcaccgaccagctgggtcgccaggtcaccctccccgaccacgtcacccgcgttgtggttctgcagcatcagacgctcaacctgctggtacaactgcatgccgccgaggatatcgtcggcgtcttaagcagctggcagaaacagctcgggccgcagttcgcccgctttatgccgaagatcgcgcagctggcgacgccgggcgatcttacccaggtcaatattgaaagcctgctggcgctgcgtccgcaggtggttttcgtcgccaactatgcgccgccggcgatgatcgcgcagatccaacaggccgggatcccggtggtggccatctcgctgcgtcacgatgccgccggggaaaaaaataaaatgaaccccaccatggctgacgaagagcaagcctataacgccgggctgatggaggggatccgccttatcggcgaggtggtcgagcgccagcccgaggccgaggcgctgattcactacaccttcgaggcgcgcaagcaagccaatgcgccggtggccgatattccccagaaccagcgggtgcgggtgtacatggccaaccccgatctgaatacctatggcgctggcaaatacaccgggctgatgatggcgcacgccggggcgctgaacgtggcggccgccagcgtaaaaggcgcccgccaggtgtcgctggagcaggtgctggagtggaacccccaggtgatcttcgtccaggaccgttatccgcaggtggtcaaacagatagagaacgacccgcagtggcagacgatcgatgcggtgaaacatcaccgcgtgtggctgatgccggagtatgccaaagcctggggctatcccatgccagaggccctggcgctgggtgagctgtggatggcgaaaaaactctatcctgcgcgctaccagagcatcgatgtggacagtaaagccagggattattatcagcgtttttaccgcgtggcgtggacgccagatgcccgctaactctcagccctggctggtgcagggaagcctggcgctggcgacgctggcgatcgcggtcgcctcgctctgtttcggccagtacccgttaagcctgagcgccgttggccacaccctggtccatctgccgccaggagaaggggtgatcgggcagatcgtctggtcggttcgcctgccgcgcgtggtgatggccctgctggccgggggcgcgctggggctgtgcggcgccaccttgcagggcgtgttccagaacccgctggtggacccgcacatcatcggggtgaccgccggctccgcctttggcggcacgctggcgatcctgttgggcgtcggcagtctgctgatgatggcctcgacctttttcttcggcctcgtcgcgctggggctgatttacgccctcgccgccctgcaggggcgggacagcacgcttgggctgattctgtccgggatcattctcagcggcttcttcgccgcgctggtcagcctgatgcagtacctcgccgacagcgaagagacgttaccgaacatcgttttctggctgctcggcagcttcgcgaccgccagctggcataaggtactgcttatgtccctgcccctggcggtggctgccggggcgctgtggaagctgcgctggcgtatcaacctgctggcgctggaggaacgggatgcccgcagtcttggcgttccggtggccgcgctgcgtcgcggcgtgctggtttgctgcgcggtgctggtggcagcccaggtggcggtcagcggcagcatcgcctggatgggtctggtggtcccgcacctcgcccgtctgctggtaggggctgaccatcgtcgcctgctgcccaccgccttctggctcggcgccgcgctgatgctggtggtggacgatctggcgcgcacgctgacccaggcggagatcccgatcgggatcgtcaccgccctgctcggggcgccgctgtttaccgtgttgctggtgcaatcccgacgccggagtacgacctgatgaacagctcattatcgctgcaagcgctacgctacggccaccgtcagccgctcttcgccccgctcacgctggcctgccggcccggtgagatctgggcggtgctgggcgccaatggccggggaaaaagtaccctgctggataccctgaccggcgtgttgccgccgctgggcggcgagatgcagtgcgagggcggcgtggccctggttccgcagtcgtttcgtcccgcttttcgctggcgcgtgagcgatgtggtgctgatgggccgggcccggcacgtggatctctttgcccagccggacgaggaggatgcccggcgggttgagcaggcgctggcgcagctggggattgccgccctggccgaagatgacttcggcgccctctccggcggccagcagcagctggtgctgattgcccgcgcgctggtcagcgccagccagaatatcctgctggatgagccctgctcggcgctggacctcggtaaccagcaggtggtgctgcagctgatcggcgacctcgcccaccgccaggcgcgcaccgtcctgttcaccacccatgatcccaaccacgccctacaggtggccagccatacgctgcttctgctgccggagggccggtggctggcgggtgagaccgccgacgtgctgagcgaaacgcatctccggcaagcgtacggcctgccggtacgcctgatccgccatgccgcctccgcgttccctctgctggcgccggggtttacgctgcgtcgctgaacggcataaaacccgcctgccggagatacccctgaccaacgtcgccgaggataaagcgatacagggccagcgcggcgggatcggccctgagacgcgccagctggtaatcgcagcgaatattccacggcgccgcgatggtcagggtacgcagatcgtcgcaggcggccagcgcggggccatagtgcgcatagccgataaacagatccgccagattctggcgaataagccacgcgccggctatctctcccggcggcacgctcagtgagtctctgccgccgaccagctgctgcgcccgcccggccatcgcgttgcccaaccctggatagcgtgcctcaattcgggcgaacagctgccaggtataatctcccgacggatcgcagcccggcgtggaggtcgccaaccgcaggcggggcgtgctgagcagcgccagccagtccaggccatcgttgtccggcgaccgccgggcggtcagcatcagctggttgctggcaaatccctggcattcctgcgccagacccgcctgcagcagcgcctgcgggtgcgccgcgttggcggaagcaaaaaccgcgcacggcgacccggcttcgatccgctcgcgcagcaggccggcagggccaaactgcgcatcgaccgccaggccagtgtgctgccgaaagtgcgccaccagcggcaggaaggcgcttctcaggcttcccgccgccagcagcgtgagagtggtatttgccataggatatcgctataaaccggataatatagcgctatattacccggtttgccgtcgcgtcagtagcgaatttctgccagcgcccgcagctgctcgggggtggctaccggtaggtcaaaaaagcgcagataggcagggatcatttcaaacagcatgtcggtcccgcgctggatgtggcactgtcgtgcctgagcggccctcagcagcggggtgtactcctgagtcatgacgacttcccccacccaggcgccaggcgccagacggtcaacgtccagcggcagcggatcgctggccttcatccccagcggggtggcattgaccaccagctcgtgtccggcaggatcgggctgcatcagggtgatatcgagctgcggatagtgctgatgcagccgcccggcgagggcgtgcgccaccttgggccgggtatcgtacagggtcagggcgctgacccccgccgccgcgagggaggcggcgatagccgatcccaccccgccgctgccaaccaccagcgcccgcgtcccctgcgggttaaaccctttacgacgcaggcccagcacaaatccctcgccatcgaacatgtctccgctcaggctaccgtcagcctcgcggcggatggcattgcaggcgccagcgatggccgccgtcgggctcaggcgctgcaccagatcgcaggtggcgattttatgcggcatcgtcaccagcgcgccgatgatgttggtcatcgtaaacagcggcggaataaacgcggcgtagtcctccggcctgacccccatcggcaccaccttcacgtccacctgctggtcaacgaaccacgggttgtagatcatcggcgccttaaaactggcggtcggatagccaaggtgcgctatcagccgcgtatgcccactaatcaccatgccttgctcctttgcttactgcgataactcgatacgtttgacgtcgccgaggataaacagataggccaccacgcccaacagcgcggcgccgccgatgtagatcaaggcgtagaagaaattgccgaacccggcaacgataaagccgatcaccagcggggtgaggatccccgcgaggttggcgcagaagttaaacaggccgccggtcagaccgcccagccccttcggggcgatatcggagatcagcgtccagccgagacccaccatcccctggccaaaaaaggcaaacgacatcaccaggatcaccgccaggtcgctctccagccagttggcggtgatgatgcagctggccatcagcaggccggcaacgatcggcagcttacgaccgaggttggctgacccggtggctttcagcagcttgtcggagagccagccgccaaacatcaccccgccggcggcggcgacaaacggcaggatggagaaaaagccgaccttcagccagggcatatgccgctcggtggccagccaggtggggaaccaggtgagaaagaacaccagcacggtattgccggcaaactggccgatactggcgccgatgatctgccgtttgctcagcagctggcggaccagcggccagctgaacgccacctgctggtcggtcggggcgctgaggccgccgccgttttcgatatgctcgcgctcctgctggctaaggcgcggatcttcatgcggttcgcggtagcagcgccaccacaccagggcaaacagaatgccgacggcgccaacgctgacgaacagcacccgccagccgaaaccgtccatgatccagaacagcagcggcgcaaagcaggccagcccgagatactcccccacggtgtacaccgccgtggccttcgcccgctcctgctgtgggaaccaggcgctgaccacccggctgttgaccggaaagcacggcgcttcgctaatgccgagcccgaagcggcacagcagcagcgtcttcagccccaccgccatgccgtggaacagggtaaacagcgaccacagggtcagtgacaaaaagtaggtcactttgttgccaaagcggtcgagaaacaatccgccgggtatctgcgccagagcataggtccaggcgaaggcggagaagaggattcccatgatcgccgggtcgatccccagctcagcggtgagctttggggcggcgatccccagtacggtgcgatcgagatagttgatcatggtgccaatggccaacagcgcaagaatgccgatacgccgccgggagcggcgcacggtgacggctggctgggcggcagccgtcgggttagggctatatgagctcatagtcggttcctgtctcgggtacagaggatgttgttattgtgtttaacgcataatgaaccatttgattcaggctaacaatactgcatcgccgccagacggacggccgcattcgctgcgccatagagcgcatagccagcccggcgctcggttaactcaaagaaaaagcggccggcggtaaacggccgggtgtaaagatgcaggaaatctcccccctgcggatcgcggtcatagaggagctgctggcgctgaagctgcccgacgtccagctcgccgccaaagcgcgccagcagatcgtcataataattggccgggatcggcagcgtatggcgggcaacctcggcaagctggtcgcaggcggccggcagatcgcggcaggcaaaggcggcatgctgcagccccgccccctggtagcaggcgacggagcgggcgatctgcgtcgcccggctctgcgaaatattcagcgccagacggatatcgccctgcgggctgcgcaccgccaggctgcgcaccagtccatacgggtccggcagcgtctgctcatgctcaagggaaaaaccaaacaccgtacggaagaacatcacccagttatcgcggctgtcggcctccattcccagcgccagatgatcgataccg

SEQ ID NO: 212 - DNA, 8815 bp, Unknown
  source: /note="Description of Unknown: MKP2_2161_1 Mutant Bacteria sequence"
gggggggccggcccggggcgcgggggggggcggcggggggccgcccgggagcgggccggccgggaagggggggggcggggcgttcggcggcacgcgctaacgctgggtcggtccgccgaggaaaatgcagcctgccgcacctgcccgggggcgcgtcaggggcgcgacgcccaggggcagtggatcgttgacccggaattcatcccgccgctgctgtcgctggcggcaagcccgacgctggttagcgagctgggcgagctgttacatcgcctgcaggcccgacgcagacgcctgatggccatgcgtcgtgaaagcaatgcgcggatggctgattttgccgtggcggatgtttccctgttctggctgctcaacgcgctgaacagcgctgaaccggtgctcagcgagctgcatcaggacccttcgcgccatccggagctgctctatcgcgaactggccaggctggccggcagtctgctgactttctcccttgaacatcatctggaagcaatcccccgctaccgacatgcctcgccagagcaggtattcccgccgctgtttgccctgctggatatgctgctcgaagtcagcctgccctcaagggtgatcgccatcgctctggagcagggcgccgaccgggagatctggcggggcaggctacacgatgcgcggctgcgcgagggggcggatttttatctgtcggtgcgctcttcactcccccctcaccagctacagagccgctttccgcagctctgtaaggcgggtagccatgatgatgtcgccgaggtcgtcaatattgccctcagcggcatcgcgatcaaaccgctgagccatgtgccggcggccattccgctacgtctggaaaaccaatatttcgctctggatctctccaccgatgccgcccgcgcgatgctggaggccggcaactgcaccttctataccccggaatcgcttggcgacgtgaaacttgaactctttgcggtactgcgctcatgaatagctctgaaagcgatctgatcaacaaaactttttacccgggctggctgatggtcagccagttacgctgcggccagccggtgacggatggcgaggcgctctatcgccaggcctgtcgatgggtgaccgaggcgcgcgaggcgctgacggcggggggagtcagtgaagccagcgctgagcagatgctctatgcctactgcgcgctgctcgatgagagcgtcctcaaccgcgccagtcaggatgatggctaccgcaggtggcgcaaggatccgctgcaggcgcgctttttcagcactctcaacgccggggaagagctctgggaacggatccgccagctgctgcgagagcccacggcggatgcggcagtgctgacctgcttctttcgtactttacagctgggatttgtcggacagtaccgcgccgaggatgacgaacggcgtgaggacgtggcgcaagcgcttggcgcgcgggtcccgccgttcagcatgacccaggaggcgccggtggtggttcgtgcctcccggctgcgcagcggacggcggatgtactggtgcggctgggcggctggcattgtggcgctggcggcgctgtggttgaccttctcctccgtgctgtcacagatggtggcgcagatagcagggcagggataagagatgcgtgataacgcccgtcgtctgcttacgatactgaccgtcatcctggccctgtggctggtgctgggcttctggccgctgtccatcggcaaccaggtgatcttcagtctgtgcatcctgctggcgggcggcgcggcgctctggcgtcagcgtcgccgggcagtcagccgtcagcgatcggaaatcgtcctgccgcccgaggattttcagggggcggtggttctggtctgcggggataccgacggtctgtttcccgggcgttcggcgcacggcgaaacccgtcacggctggtatctccggggtgacagcgcggagcagttgccgcggctggcgcagtacctggcggcggcgcgtccggcgctggtatcgcaggtttccgtgctgctggcggtggtaccggagcaccacccctccggggagcatctggcgcagtcgctgcgcgactggcggcggagtatcgttcagtgccgaacctggctaaacggtctgccgcctgtgtggagcgtgttctgggtgacgccgccaggcggccaggccgcggaaagccgctggtttaccatcacgccggagagggctggtctccaggtgcagcagaagggacaagcgccccagtcggttgccgggtggcagcgggagggcagctctgcctcacgcctgcatcagacgctgtggctggagagcattctgaccttggccgaaaacgctcttttccggccattccgcgcccggcaggcagaacttcctccgctgaacctgtgtgccgcgggcatctgccttacgccggtggcggcggtggcgaataacctctggcaacagcaaatcgccgggatcaccacgctctccccgggcaacgacgcggcgccaggtcctcacccgctgccggatcttcttctgtcgtcactgccgcaccgccacggggtcagccgccggatgcgcgatgccggtcttgccgctggggtgggcttcctctttctggcgctggcgatgctggcttcctttatcaacaaccagcgcctggtgcgcagcgtcggcgatcatctggcggtgtatcaccgcctcagcggcacgccgccgacgccgaagctgcaggcgcagcagcgtctgcgtgccgacagccgcctgctggatgactggttgcgccggggggagccgctgcgttatcggctggggctgtatcagggggggcggctgatccccttcgttgaagccgctatcaatgactgggcgccgcccccgccgccgcgtccggtcattaagcaggttgtgcaggggccgcagacgatccgcctcgatagcatggcgctgttcgataccggcaaatcggcgctgaaaccgggttcgacaaagctgctggtgaactcgctgctgggcattaaggccaaacccggctggctgatcgtggtggcaggccataccgacagcatcggcaacgatagatccaatcaacaactctccctgaagcgtgccgaggcggtccgcgactggatgcgcgataccggcgatgtgccggagagctgttttgcggtgcagggctacggcgcaagccgtcctgtcgccagcaacgagacgccagagggacgggcgcaaaatcgccgggtggagatcagtctggtcccgcagaaggacgcctgtctgacgccgggcacggccaatacctcaggagcagagactaacggattaaaaagcgaaaccgagtaatcagcgaccccgatcgcggaggttgaacaacaatctgcctgcctgaccctgtgcgctacgggtccctgataaacaggaaacagcgatgggcggtagcgtgcctgcagccagtcaatcttgtcggctaagcgaagcctctgcggggatgaagctcgggaaaggggatggataaaggagatcagtatggatagcgctaaagacagtgccagagaaatgctggcggcgataaacgttgaaggctccggtttctggctgctttttttatttctcagtcagtgaatataaatatccctggggttaccttttagttacgaaactcctggtggggtatctgatatatcgatatgcacataaatatatttatgatgaatgagatgattgtcattaaacaaaattaaacagggcgtcctgtgaattgatttttgatagtcattacagcggagtaaaacaggaatataatggatacctcttcaataattaccggcaccacccttaaccgttaccagctgggtattccttcatgtaccgcatcgctggatgtggaagaattcagtggggcagaaaaactgagtgaactttattattacactattacgtttaccagcgcagagaaaaatattgatgccgcacagctcctgagcaaacccgccatgctgacgatgggcggcggcgcactgcagcagttggcggactgcaaacgcgtccatggtgtgattaccaccttccggcgcgtcaatcgttctgaagatcagtcgacctatcagataaccctccagccgtttctctccctgctggataaacagtttcgcagccaccgttttttcgtcaacaaatcggtgccggaggtggtggagcaggtattgcaggaacatcacctgcatgactgggagtatgagtttaatctcaagcaacactatccgcggcgcgagcaaattaatcagtatcaggagagcgacctggcatttatccagcgcctgctggcagaggtggggatattttatttcttcaccctgcaggaagaggcgcagagcgaagtggttcacttcgccgacgcgcagcgggcgctgatgttcgataaaacacttcctgtaaacagcccgtccgggatgagcgacagcggtacggaatcgatttggggtctgaacatcacgcacaacgtcgtagaggcgaacgtcactacccgggattataacccccgcgatgcgcagagcgttctccagtcggcaacagcggatatgacccggggaaatggtgaaggcatcacttacggtgaggtataccactataagcttcgccaccgggagcgtggcgataaaatcgagccgcagacggagaccgccaacttttatgcccgcctcgaccatgagcgttttctggctcaccagacgcttattaccgcgagcagtactgcagcctggctggcgccggcccaggtgctgaccgttaccgacagcctgccgtcgaccctgcctgcgcccgtacaggatccgctgttaatcaccggcaccggttttaccgccagccgccgggaggcgctgcgggtgtccctgctggcggtgccctacagcgaaacattgtgctggcgtccgccgctgctgccgcgcccgaaggtgactggcaccatgacggcgcgggtgaccagcgcgaaagcgaatgatatctacgcctggcaggatgcgtccggcctgtaccgggtgaaatttgacgctgacagagaggataaagggcagggtcaggaaagcatgccggtgcgtctagccaaaccctacggcggcgacgtgtacggctttcacttcccgctgatccagggcacggaggtggcgattgctttccacgaaggcgaccctgaccggccgtatattgcgcatgcgctgcacgactcgcggcatgtcgatcctgtgacggagaaaaacagcacccgcaatgtgattcgtactccggccaacaataagctgcgaatggaggataagcgcggcgaggagcatatcaagctcagcaccgagtacggcggcaagacgcagctgaacctggggcataacgtgaatgcgcaaagggagttgcggggcgaggggtttgagctccggacggataaatggggggcgatacgggcggggaaagggatctttatcaccgcagataaacagtcaaccgccagcggcaagatacttgcaatgcaggataccctggacaggcttaagcaggcaggtgatgagatggactcgctatcgcgtgatgcccagtcggctaaagccgacccagcccaggttgaacaacagttagcttttatgcgtgagcaaattgatcagctacgggaggcggttgccgtgctcagcgcaccaaatggtgtggctctcgccagtggcaagcatctgcaactaaccgcacgtcgcaatctgatgctcaatgccggggcagatgccgatatgggcgttatgaaacggctgtttattggtgtgggggaagggctgagcctgtttgtccgcaagctggggatgaaattaatcgccaatcaggggcccgtggcgattcaggcgcaaaacgatcagttgcagctcctggcgcgcaaggatctggagattgtcagtactgatagcgaaattcacattgtggcaaagaaaaaaatcatcattaacgctggaggaagctatatcaccctcgatccctatcggattgagctcggtactggcggtgatgtcgacgtcaaagccgcggatttttcctatagcggacccgccagcatgaaggccgatcatccggattatccgccacttcagtccaccgtaaggcaatcgctgaaactgaacgtggcacagtcgccaaatgcgtcggacagcagctgggccggaatgccatataccctgtatgccgatggcgcattgttgaaacaaggggtgctggatgaaagaggtcagatatcagtcgatcaccaggtcgtgaccagaagttacaagctggagatggctaatggcgtcagctatcagatacccgttgccgaagcgtacagtcgccctgagcagggggaactcgctaatcgcggctttcaccaccatacctcgcaggctgcatctgatattaaccccccctcctcacatacggagcaccgtaatacttacgcggatttgctcgatggccatattgaacaggacgaaagtcaatgagtcacaatgatattgttaccccggttgctacggttgataccagccaatgtatgatcacctcgccctggtttgttcagaatacggaatacccaccggcagtggcaacgtataagccgctggtaaacggcgaggaggcctttgcggcggtatatcgagccatcgaaaaggcacaaaaatcggtggatattatctgctgggggtttcaaccatccatgtattttattcgtgacggacaggcgctgcgcatcggggaattgctctgtctgcttgcggaaaaacaggttcaggtgcgtatactggggtgggaggcgccctttaataccgccggggttgtcggcgaggcaaaccttcccggaaaggggatcctgcatcttcaggatcgcgccgggcagagtgcgacagacgaacaatatgcttttgaccgcgattggtttacccgtcattcatatagtgacgatctgctggattccagcaactttttagccagcacaatcaataagcagttcaatcagtggactgtcaatcccctatttgtgggccgcgggtttaataaagtagaacgtgcggaaatcgcctggcgggcgagatatcaggctctcgataaagggctcagtgccagcgcggtggggataatgacgctagcgccgtcccaccatcagaaaacggtgctggtggattatgaattacctgaaagcgccatcggttttgtcatgggacataatatgctcgatgagtattgggataccgatgcgcactcttcccagaatcggttcgggggcccggccccctggggacctgatcaaggcgctcgcggctttttaccccggcaggatatttccagtcaggtgacgggacccattcttgaacatctgcacgaaaattttgccaaagcatggcgtaaggaaaccggggaggaccttatcaaaaagcgtcaggcccgtgagatggcgaaacgccttaaaccgcggaaagagtgtggtaccctgatacttgcccagttcctgcgcacgcagtcgcaggaaaataaacgtgatatcgaaaaactctatctgcaggcagtcaacaatagcacgcagtttatctatattgagaaccagtactttcgttggccaccgttggcggaagttataaaaaaagcggcgcacttgcagattgataaaggacgaacgccagaaaaagacggatcgttacatttatttgttatcaccaatgtcacggaaggggggattggggcgggtacggtaaatacccagcgtatgctggaaagcctggggcgcgccaatacgattccaggcgtgacccgggcccgaatgatagagaagatcagggaggaagacccaggcaaattcgcctctctcgcctggtcccgcaatccggccacccaggcgcagattaatgaagagtttatccgccggcagaaagaatatgaagcacagctaaaacaagcagaagagttaaaagatagcgatattccaatggtaccaatacccggcctgaaaatacatatctgctcactggtggctcaggactctcccgtggataactgggtgccagtttatatccactccaagctgatgatcgttaatgacgttttcacaacacatggttcggcgaatattaatacccgcagtatgcaggtggacagtgaaatgaatattgcacatgagtggggcagtgtgacccgggatttaagacgacggctgtgggggttgcataccagtgggaaaggcgtgcaggacaatgcttctgatgcatttgatgcatgggaatatattattagtaaaaataaagaacgccagcaaaaccatcagaagcctattgccccgctgattgctttttattatgccaacaacgaactcaaggatctggattgatgcgccagttaatattattcctgtcgctgatggcatgtctcctgcacagcgcatcgtctgctaaaaaggacttatttgtgaatcctctttccgatactcacgccgccctggcgtttacctgcgcacatcagataattcctgaggcgtctgctgataccgatgtcctgtttaaatacgcccgctggctgcagaaaaataacctgctgaagcaggataaaagcgtcgatgcgcaaaccgaacggctgtaccggatagcggctgagaacgggcactataaggccagcattactctgcagaacggcgccctgcgcgggcagttttcgctgagcagccatgagcagttccggctgagccagcagcttatcgctgccggggtggcgaccgggtactatctgaccgctatctatctggaacggggcgtcgcggggctgcagcagga

SEQ ID NO: 213 - DNA, 8519 bp, Unknown
  source: /note="Description of Unknown: MKP2_2161_1 Mutant Bacteria sequence"
ttgcgcgcagagggcggcatccgcgctcctctctggtgtcgggggctcggagttttgtataagggacagcctgtgggccgcatattcacccctgctgttacgaagtctccgccggattctatcagcaactgctggaccagcccggcggtgaccgggtggcccgccatcgccagcggctgttccattcccgttcgggcccggtcagcgatccgctcaaagccgccgcgcgtggcagcgataatctgtggtttgatctgcgcgcctttgccgaagcgctcttcgcagaggcgggggtggtgccggcgagcgttgaatggctggggagttgtacctactgcaccccgcagtcgctgggctcctaccggcgccggacccattttccggcgccgaagagctttcagtattcgtggatcatgcgcgaagcctgaggcgggctcgcgctagagcacccgaaaaccgtgggtgccgtcgcgggccagctgatccaccaggccatactcccactccagataggcctgcatggcctgggcggaattatcggttccttcgtacggacgacgatagcggtcacggcgctcgacggcgaggccgctgtcgccatgcgccagcggcagaccggcggcgatccacgccagcgtcccgccggtaagcaactgcaccggtttaccggtcaaggccgccacctccggcaccgcgtagcgggccagcagactgctgccgcaggtcaccacgtaacgttgggcgggagggattgcttccagggcctggcgcagctgcgagcgcgttagccaccacgcgccggggatatggcgagcgacaaagttggcgctggtggtaaaatcgagcaccaccgtaccgggttcttccagctgttgcgccagctgcgtcgggcttatctcctccgcctgcgggccgggcggcacctcggcggcaggcaccccgcgttcgctcaactggctggtcgacagcgcgctcagccgcgccgtctcccagcccatctgcgccagccacgagccggttatcgccgcccggatgccatcgtcatccagcagcacaatgcgcgcccctcgtacgctggcgaagtggtcggtctcctgcaccagctggccgcctggcgcgctcaggctgccgggatagtgacccgccgcgtactcttcggggctgcggacatcaaacaggaaggtggtgcggtcgctctgctgctgccagcgttgcagcgtggcctcatcgatgaccgccaccccggcccgttcggcaaaatgcgccacctcagcggcccgggcgccggaggcgcgggcggagggatcgtattgccgctgttgctggtgcgccagcgtctggccggccagcgtccagccgatagtgccattgcgcagggcatggaccgggtttggcacgccggcgttgatcagcgactgggtgccgatgatgctgcgggtgcgtccggcgcagttgacgataaccggcgtctgcggggagggcgtcaggctctctacccgcagggccagctcgccgccgggcacgctgatgctgccggggatgctcatggtctggtactcatcgaagcgccgggcgtcgacgatcaccacctcctgccggctgtcgatgagcgcctgaacctcctgggcgctgagcgacggtgtgtgacgcacgctttccaccagctcgccaaaggctttactggcggagttgacgtcctgaaacagctcgccgccgctgcggcgccagccggcgagaccctcggccagcagggccacatcctgatagccccaggaccgcagccgttcgatggcgatctccgccagaccctcgccgttgtcgtagacggtgagcggggtggtgaagcgcggtatccgccggcggacctccagctccagtttgctgagcggcagattgacggcaaacagcggatgagcggtggcgaaatcggcctcttcacggacgtcgatcagcgccagttcacgacggtcgagcagcgcctggcggatcccggcggcctggcgataagcgtaggtggacatagtggttatccttgatgttcgcgggaggaatcccagatattgggtaaatggcggttagagtagccggagataaacggtttctgctgcccttccggggtatacacggcgcgcttcaccgcgccgatattgccgccgtagacatgaatgctgatggagacgcgatccgccagcgcattgctgacgcgatgaatatcgccatcgtcagcggagactttctccacctggcctgcttccagaagcgtggcggcgcccagcgcgcgcggtatgccatcggcatccagctggtaacgctggttttcctccgcgccgcgcagcatcccaatggccccccacacccggtgatcatggatcggcgtcgcttgccccggtccccagacgaagctgacaatcgagaagcgctccccggagtcggcatgcagcagatactgctgataatggtgcggatgcggcagggtgtactcttccggcagccagtcgtcgtaacgcaccagcgccgccagccgctgcgccacggcgtcaagcagcggggcggtctggtggtgttcgcggtgcaggcggtctacctcatgaatgaaatggcgtaatttttccagtcgtggtgcagtcatgtgcggttcctgtcagagggactggtcaaaacgctaacagaggcgttaatattatttaaatgcaatttacgcatatattaatatgcaaatttaacataaggatcctatgcgcattgacgatatcgacgctttgctggccacggtgcagttttcctccctcaatcaggccgcggaatatctggggatcacccagtcggccatcacccggcgcctgcagcgtctggaacaggagctgaacgtcacgctgttagagcgccagacccgcccgctgaccctgaccgccgccggacaccgggtgtacgagcagtgtctgagcattaagcgtgagacgaaaaaactctacagcctgttggatccggaaggcgagccgcgcggcgcgctgcgtctcggcgtgccgcagagtctcagcgagattgccctgccggcggcgctgtcggcgctgagccagcagtttcccggactgtcgccgcagatcacctgcggctggagcggacagctgcagcgccggctggaaaacggcgagctggacggcatgctggcgatggggcccgcccagcaaagcttcgccgagggctacagcgggcgcctgctgtgtcccctggaggtggtgccgatcgtcggccggcgtttgaatttgcgcgcgtcatccctgcgggagtgcgccgaacggggctggatccttaaccccgacggctgtggcctgcgcgccgggctcattcgcgagctgcagagccagggattgcggttgacgctcaacgtcgagagcgcgggcgcgcagctgcagatagcgctggtggcgcaggggctggggctgggtctggtgccgagggcggcgctggccagcagcccgtggcgggacgaggtcgcggtcctcagcctcagcgattttcagcctgcggtctcactgtggctgatccacgcccagtatctggcgaacctgcagccgccgctggccttttttgccagcaaagtgatgcagcagctgaccgtatccgactgaaagcaaaatgcatttttgtttaatgctaattaagcatattaagatatgataaaaatgcattttgctcattaacacgctctgtatagggtaatgaccagcgccgctgtcgcggccactccattaccctgacgcaaggagttgttcatgagcattcagtttctcggcatgattggccaccgcctctcttccgaaacgattgccccggtggggccgatctttgaccgcgactatatcgttcgctttgcgcaaacccatgaagccgccgggtttgatcgtctgctggtcggccactggtccgatcaacccgacggctttctggtgacggccctggcgggactgtcgacgcagaaaattcagtacctgctggcccatcgtcccggttttgtttccccaacccttgccgcgcgcaaattcgctacccttgagcacctgctggggggccgcttggcggtgcatatcatcagcggcggcaacgatgccgagcagcgccgggatggcgattatctcgaccacgaccagcgctacgcccgcaccgacgccttcctcgacaccgtgcgccaggtgtggaccagcgagcagccggtggatattcacaacgatttctatcaggccgagcaggcctggtccgccattcgcccgctgcaaaagccgcatcttcccatctacttcggcggctcgtcggaagcggccatcgccgtcgccggcaaacatgccgacgtcttcgcgctgtggggcgagtcgctggcgcaaaccggcgagaccatccagcgggtgcgcgccgaagcggcgaaacaccagcgtgatatcggcttcagcgtctcgttccggccgattatcgccgacagcgaagccgaagcctgggagaaagccgagcatatcctgcacgtcgccaccgagcaggcggcgcagcgcggaggcgggttcaaagccaaaccggacagcatcggcgcccagcggctgcgggctactgcggcgcagggcagagtggtggacaaacgtctgtggaccggcatcgcccagctggtgggcggcggacataactccaccgcgctggtgggcaccccggagcaggtggcggatgcgctgctcgattactacgacctcggcgtgcgtaacttcctgatccgcggcttcgatccgctgaacgacgcggccgactatggccgggcgctgttgccgatcgcccgggaaaaagccgcccggcgtgcagtggcggagcgcgcatcgtgatccatcctgagcgcgacgactgggcccggcagctgacggcgcttcgccagcagatggcggagcaggcggccagccttgacgccagcggcgagtttccctggcgtaatatcgaccatctgcgtgcggggggctggttaagtctcgccgtgccgccatcctgcggcggcgcgggcgccagtctggcccagctgcagcaggtcatcgccgccatcgcctggggagagccggcgacagcgctgatcgtctgcatgcagtatctccaccatttgcggctggcggaaaatgacgcctggcacgcgccgctgcgccagcaggtttttcacgatgctgtcgaacacggtggcctcatcaacagcctgcgcgtcgagccggagctgggctccccagcgcggggcggcctgccggacaccgtggcgacccgtcgcgcggagggctgggacatcagcggccataaaatttataccaccggcattgaagggctgcgctggctggcggtgtgggccagaagcgatgataacccgcctctggtgggcacctggctggtgcctggcgacagcccgggcatcagcgtggtgaaaagctgggatcacgccgggatgcgggccaccggcagccatgaagttatttttaaccacgtgcgggtggcggcagagcacgcggtggatgtctggccgaccgatgcgccacccgccgcccaggccgaaccgtttcgcctgttcgccaaccggcagacggcgctgctggcggcgatctatgacagcattgcccacgccgctcacgactggctggtgaggtggctggcggggcgggtgcccgccggtctcggccatccgctctctcgtctgccacgggtgcaggagaaagtcgggcagatcgccgggctgctgctggtcaaccgcagcctgctggagcaggccgccgcgctgcgcttttccgctatcgaagccaatctggcgaaagtcaccatcaccgacaacgccattcaggcggtgaatattgcgctcgagctgaccggcaatcatggcctgagtcgacagaacccgctggaacgccactaccgcaatgtgctctgcggacgggtacataccccacagagcgacagcgcctggctggcagccggcaacttcgtctttcaatcacaaggataatcacgatgcgtctatcattttcaggccgggtggcggccgcgctgatgctgctggcgctgggcggctacgcgacagcgcaggagcggcttaccctgcgtatcgccgatcaaaaaggcggcatgcgttcgcagctggaggcggccaacgccctgcaaaatctcccttacgacattaagtgggccgagttcccggccgccgcgccgctggcggaagccctcaacgcgggcgccgtggacgcggggatcattggcgatgcgccgttgctcttcgccctggccaacggtgcgccggtcaaagctattgccgtggataaaagcaacccggcggggaccgcggtgctggtatcccccggcagcacgttaaaaagcggcgctgatttaaaaggcaaacgcatcgccaccggtaaagggtcgattggtcatttcgtggcgctgaaagcgctggagcaggcggggatttcaccgaaggaggtgcagtgggtgttcctcggcccggtggacgccaaagtggcgttgctaaacggttcggtggacgcctgggcgacctgggagccctacaccacccaaatggtgaagaccaacgaggggcagatcctggtgagcggcaaagggctgctgccggggaataccttcctcgcggcaacggattccgcgcttaacgatccgcaaaaacgcgccgcgctgcaggattatctccagcgcctggccggcgccgagcgctgggcctacgccaatctcgacagctacggcaaaacgttgggggagatcatccgcttcccggcggagatcgcccgcgcgcagtttgccaaccgccagtcgcagtggcagccgctggccgaggaaacagtggcccagcagcaggcaacggcggacttttatctcgccaacggcctgatccgcacccggctggacgtgaagccgacctttgaccgccgttttagcgtgcccgccgccgaggtgacgccatgaccagaaccactttttcccgccgccgttttttacagctcagcggcggcctggcgctggccggggtctctctgccgctgtgggctcatgatatggcggacatggccggcggcgatgcccatccggcgctgcgcctgccagagccctacaagatcaagctggcgatcaacaaaagcgcggtatgcctcgcgccggtcgccgtcgccgagcagcagaagatattcagtaaatacaacctcgacgttgagtttgttaacttcggcaactccaccgatgtgctgctggaggcgatcgccaccggtaaggccgacgccggggtggggatggcgctgcgctggctgaaggcgctggagcagggctttgacgtcaagctcaccgccgggacccacggcggctgtctgaacctgctgacggctaaagactcgccggtcggcggcctcgagagcctgaagggtcaaaccatcggcgtcaccgacatggccggaccggataaaaacttcttcgccattctgcttaagcgccacggtatcgacccgatcagcgacgtgcagtggaaagtctacccggcggatctgctcagcgtggcgctggacaagcgcgaaatcgccgccatcagcggcagcgagccgttcagctatcgtctgctggagaccggtaagtatcagctgatcgccagcaatatgaccggggattatgccaacctcagctgctgcgtgctgggggtgagcgggagcctggcgcgggaccataaaccggccgccgcggcgctcacccaggcgatccttgaggcgcacagctatgccgctgcgcatccggaaagcgtggcgcaatccttcctcgcccatgccctgaataccagtgaagcggaggtgagcggcatcctgcacgggcagggccacggccatcacgcggtgggcgaagcgttcgtgaaagagctgacgcagtatgcggtcgacctgcagcgggtgcaggtgatcaagccgggtaccgatccccatcagttcgcggagagtatctatgccaacgtattcgcctgagcaggctctggcgcgccccaccggccgcgcgccgctgtggggagaagggctgctggccgccgcgctgtggctgctgggcggtctgtttactcttacctggcccgacgctgggcggcgctggccgtttagcgaaggctgggcgctggcgcaattcaccctcggcggcggcttgctgctgctggggctgagctatcgctactggcgggcgcgcggcgcgcgtgtgcggcatgccggcaagtggctggcgctgctgccggtgctgtttgctgtctgggaagggctgaccgccaaaactgccgtgttgccggtaccattctttgcgccgccgcaggcgctgatcgaggtgctacacgacgactggccgcgcctgctcgacagcctgctgcactccctggggctgctggggctcggtgtgctgctgggtaccagcagcgggttcatcacctgtctcttatccaccactgacgcagccgccgagctgccaagtcgacgccgctgctttgcccgtag

SEQ ID NO: 214 - DNA, 6985 bp, Unknown
  source: /note="Description of Unknown: MKP2_2161_1 Mutant Bacteria sequence"
ggacggagaggacgagaggggagagcggggggggggcgcgaggaggggggaaacaggcccggggggagacaggcgcgggagcggtggcgatggaacaagcaacggcacgggcagcgagagtggcgcgagaagaaacgcgtggtgacaaatgagcgggatgaggcgttatgaagcgggggggagggggggggggggggcgggggggggggggggggggggggggggggcgggggggggggggggggggggagggatcaggcctgagtttcccgccagtcgtcgagggtatagagcgtggcgcccgcggcggccatctccataaacgcctggctgctgtcccgcggctgcagatttacgccgcgacagccgtcggtgatgacgttgaccgcgtagcccagcgtcagggcatccagcacggtgaacttaacgcagtaatcggtggcgaggccgagaacggtcagctccacgatcccctgaccacgcagccagccgtccagttcggttttctgccggtgaccgttgtcaaagaaagcgctatagctgtcgatgatccggttttgccctttgtggaacacagcggcgatcgcctgctgcttgagcagcggatgcagcgccgcgccttcgctgtgctgcacgcagtgatccggccagaaagtttgcgccaggccgtccagctcgccctcggtgtagggttccacctggtgctggctggcgaagctgccgtgatccgccggatgccagtcctggctggcgacgatgggctcgccgcgcgccaggctccagtcgataagcgcattggctacctcgacggtactgtcgccttcaggaaccgccagcgcgccgccggcgcaaaagtcgttctgcaaatcaaccagtaacagcgctcgatgtgccatacgtcctccttaagcctcgtcgggggtgagttcgccacgcagattttgctgcatcgccgcgcgaatggcgtcaacgtccagctgctggctaagcagatagtgtagcttggtcagcgtcgcttccaccgtcatatcgaaaccactgatgacccccgcctgggcgagggcgttgccggtggcatagccgcccatgttcacctttccggacatgcactgcgtcagattgaccaccacaataccgcgctggctggcttccgccagcacctgaataaactcgccattctgtggggcattgccgacgccataggagcggaggatcagcgctttcaccggttggcgcagaaaattacgcaccacgtcggcggagatgccggggtaaatcgtcaccacgccaatcggctgcggagtgatggggtgcacgataagatctccgctgccctgcggtgccggcggagtaccgagacggcgaatatggatcccggcctccagcagcggggcaaggtttggcgaggcgaaagcgtcgaagccgtcggcatgggctttggtggtgcggttgccgcggaacagtcgattgttgaagaacagcgccacttcgttaatcggatagttggcggcgacgtacagggcgttgagcaggttaatctgaccatcggaacgcagctcggccagcggaatttgtgaccctgtcacaatgaccggcttgccaaggttttccagcatgaacgacagcgccgaggcggtaaacgccatggtgtcagttccgtggaggatcacaaagccatcatactcctcataatggctgcggatatcgtcggcgatgtgctgccagtcctcgggggtcatatcggatgaatccatcagcggatggtattcatggatcgtgaagtccggcatctccggacgatggaactccggcatcagcgccagctgacgctgcagatggccggaaacgggtacatagccgtgttcagagcgctgcataccgatggtcccaccggtgtaggcaacgtaaatcgattttttttgcatagcatcgcttaggttggtcgtagacaggcgcagtataaagagacgcaggaaaaaatacagcgtcggtcgcgggctttgtggcagtgttggcaggagagggaaaaaggctgccccgggagacggggcagccgctgcgtattaacggatgttagcgcaggtcaggcagaaggcatagcgattctgcgggtcgttaaacgccgccagcttgtcgctctccgctttcaccgtctcggccgccgcggcgaccggcgcaggcagccaggcctgaatggccgccggcagcgaggcgcgtaccgagccggtcaggctatccagcaccatcgagaagaaggtcggctcttcctgatagtagttgaggtgccaggttttcagcttcgccagctcggcggctttggccaccgcgtcgtcgaagtcgccgaggctgtcgaccaggccgttggctttggcatcttccccggtccagacgtggccctgggcgatctggtcgattttctccggcgtgctcttacgggcgttagccaccagggtgataaagcgctgatagccattctcaatgctcaactgcatcagctgctgcacttccggcggcagcgctttggtgctggagacatccgccagcggcgacgtggcgacgccgtcggtgtggacgccaatcgacccgagggtattttccacggtgttgatcaccccaaagatgccaatggagccggtgagggtgcttgggttcgccacgatgtaatccgctggggtggagatccagtagccgccggacgccgccatgccgcccatcgagaccactaccggtttaccggcggctttggctgccgccagctcttcacgaatgatttccgaagcggttacgctgccgcccgggctgtttacgcgcagaacgatggccttaattttcggatcgaggcgcgcatcgcgaatttgcgctgcggtggtatcgccgccgacgttgcccggggtctcttcaccgtccatgatggcgccgttggcgaagattaccgcgatggcggaaccctggtcagacggcgtcttcacgttgtagtcgtaatagctgatcgcccggtaattgttatccgctttgctccagccaaactgtttggtcagcgccttttccacttccgtggaggtcgccagctcatccaccagcttattgtccagcgcatatttcgccgtatcgccgcccaccttacgcaggccatcgataatgccctgggcgcccgggaagagctgctgggcggtgatctggcggttggcggcaatggtgttgaggtagttctgccacagttcgccaatccagcggctatccgcttcgcgggcggcaggggacatatcatcgcggatgaatggctcgacggcggatttataggtgccgacgcggaagacatgggtggagaccttcagcttatccagcagcgatttgtaatatagcccgttggtagcgaagccgtgcaggtctacctcgccctgcggcgagagccagattttgttggcgaagctcgccaggtagtactggccctggctgtagctgctgccgacggcatacaccggtttgccgctatcgcggaattcgcgcagcgctttgccgatgtactgcatggatggctggtcgccaccgacgaagtttttcagatccagcacaataccggtgatattgcggtcatccttcgcctggcgaatggtctgcacgatatcgaacagggagttctcctgcagacggtccgagctggcgccaaacagctggcggccaatcacgccgagcttgctgctggcggatggtttatccaccaccacgccggtaatatccagcaacagcgcgccgcgcgcggcatgttcgctggtggtgctgctgaactggctccagatgccgatacacaccagcaccagcaccaggaagatcgcattgagggccagtttgcgaataaagttgagtatccgccacgtccatttaaaaaagctggcaatcagtcgccaaagggttcgcatgtcttctccctaacgttatctaaaaagggcaggccgcaggggccgccgcgtctggctatcctaaagagtgagccgtcggttgtcagcaggaatcaccgaccgcgctgtaacaaaatccttgtgcatgttaattttatgaaaaatgacatcacaggagttatacagatggatgctctcgatctactgcttaatcgccggagcgcttcccgcctggcggaacctgccccggcgggcgaacagctggaaaacattctgcgcgccgggctgcgcgccccggatcatgccaccctgcagccgtggcgcttctttattatcgccgatgacggccgcgagcgcttcagccagttgctggaaaaaggggccagagaggccggccaggatgagaagggaattgagaaagcccgcaatgcgccgttccgcgcgccgctgattattaccgtggtcgcgcgctgtgaagaccaccctaaggtgccgcgctgggagcaggagatgtccgctggctgcgcggtgatggcgatgcagatggcggccctggctcagggattcaacggtatctggcgcagcggagcattgaccgagagtccggtggtgcgggccgccttcgagtgccgcgaacaggataaaattgtcggcttcctctatctggggacgccgcagctaaaagcctcaaccaccattgccctgccggataccgcgccgtttgtgacgcgatactgagtccgcgtgtgttatgccgggtggcggctgcgccttacccggccaacgcatccgtctctgactgtctgtaggcccgcgcaagcgcagcgccgccgggcaaggacagcgggcacggagccgattttgtgccgggtggcggctgcgccttacccggcctacgttcgtacgacctgtcgttaatttattcacttttcttgctgaaactgccggtgctgacggcctcaaaatcgctgagacgttcccggcaggccggggcagcccgcatggatgcgggctgagggccgtgttttgcagggacgctgcctcggcccgacccgcagcctgcagggataagtcgaaggtaccacgcagtggcgattttgctggccggagcccgggggtacagggggcggcggcgactggccgccccctgtgcgctccctgcgccatacgagacataacgcagaagatcaaccgggagcgcaatctgcccggaattaacatagaagttgtagccctgccagacgcagcgcgaacagggaaatattcagttgtgacgttatttcgccgggtggcgactgcgccttacccggcctacaacgactgccgggcaatccgacccggacgacgactcaaccctgcgcggcgtcgatgtcgtcaaacacctgctgcgccagatgcatcgtggcattggccgccggcagcccgcagtacagcgcagagtgcatgatcagctctttcagctcatcgcgggtcaccccgttgttaaacgacgcgcgcagatgcatcttcagctccgcctcgcgattgagagcgatcagcatggcaatagtgatcatgctgcgggtatggtgatcgagccccggacgcgtccaggtctcgccccaggcatagcgggtaataaagtcctgaaactcatcattcaacggcgtcagatgctgcagcgtacggtcgacgtgggcgtcgcccaatactttgcgccgtaccgccatcccgtcctgatagcgctgtttatcatccatggcgttccccctggaaaaagctcagcagcgctgaagtaaagcttttcggcgcctcaatgttagacagatgcgatgccgccagaaccaccacctcggaggcggggatctgctgctgcaggaaatgagcgtcaccgaccgtggtgacagggtcactttccccggcgatgattagcgtcggcagcgggatctgccccacttcgccccgcaggtcggcggcggccagcgcctcacagcaggcggcatagccttcagcatcggtatgggtcagctggtgacaaagcgcctcgaccacctccggcgccttctggcgaaacgcgtgggtaaaccagcggtctgccgctccggcggccaccaccgccatcccctcctgacgtacggcccgcgcccgcgacagccagctggcctgatcgccaatgcgcgccgcggtgttggcgaccgccagaccatgaaaacgctccggcgcaaagcgtcccagccacaggccggtcaaaccgcccatcgagatcccgcagaaccaggcgcggtcgatattcaggtgatcgagcagcgcaatcacatcctcacccaactgggcgagggtcactttgccatttttcgtcgttttaccgtggccgtgcgtgtcgtagcgcagcacccggaaatgtgcggttaacgcctcgatctgcggctgccacatcgcccgggtggtgcccagcgaattggagaggacgataaccggcgcgccatccggcccgtcgagttgataatcaagattcatcacgttgctcctgataacgcgccagcacctggcgcacaaagcgttcggcgctgccggtcgccgttgccgggtccagcagcgtggttaagcgttcacgagagagatactgactgacctgtgggtcagccgcgagcagatcgaccagcgggcagtgacggtccagcgcctggcggcacagcgcctcgatatgatgatgcgcctcggctttgccaatgaattccgccagcgccagagtcaccgcctcagccataatcagcccatgggtgatatcgagatcggcgcgcattttctgcgggaaaacctgcatgtcgcgcaccagcgcctcgctttgcgccaacgccccgcccaccagggtaattagctccggcagggtctcccactccgcctgccagccgcccagcgcccgctcatgctgctggagttggctggcgtagagcgtcgccatcagccccggcgtacgctgggcggcggtcaggatcgccgcgcaggccaccggattgcgcttatgcggcatcgtcgacgaaccgccgcgaccttccgccaccggctcgcccacctcagccacttcggtctgcatcagcagggaaaagtcg

SEQ ID NO: 215 - DNA, 6640 bp, Unknown
  source: /note="Description of Unknown: MKP2_2161_1 Mutant Bacteria sequence"
gtaccggatctgatcctttacggcccggcgcagcgtaaaggggtaattgctttcaacctcggtcagcatcacgcctatgacgtcggcagcttcctcgataactacgggatcgccgtgcgcaccggacaccactgtgcgatgccgttgatggcccggtatcaggtaccggctatgtgtcgggcatcgctggcgatgtacaataccacggaagaggtggaccgcctggtggccggcctccagcggatccgcaaactgttagggtaaaggacgggacaatggcggcactaccggacaaagacaaactgttgcgtaactttagccgttgcgccaactgggaagagaagtatctctatatcatcgagcttggccagcgtatggcgccgctaagcccggaagaacatagcgtgcagaacattattcagggctgtcaaagccaggtctggatcgtgatggaccaggatcccacaggcgtgatcaccctgcgcggcgatagcgatgcggcgatcgtcaagggtctgatagcggtggtgtttatcctctatgaccggatgaccgctcaggacatcaccgagttcgacgtgcgtccgtggtttgaaaaaatggcgctcacccagcatctcaccccctcccgctcgcaaggcctcgaagccatgatccgcgcgatacgcgcgaaagcggcaaatattagctagaataaacaggtagatttcattctgttacgtccggcagggcgctgaccctgccgccgttcagtctcctggcgttttatcagcgaaagaaggaatctcagtatgaaacgcaaaacgatgatcaccttagcccttctcagcgcccttggcgcctccacggccgcctgggccgttgattacccgcttcctcccgccaacagtcggctgattggtcagaatcagtactggacggtccaggagggagatcgcaacctgcaggcgattgcgcgccatttcgataccgcggcgatgctgatcctcgaagccaacgatacgattgcgccggtgcagccgaagcccggcactcaggtccttatcccttctcagatgctgctgcccgacgtgccgagggagggcattgtcgtcaacctcgccgaactgcggctgtattacttcccgccgggagagaatcaggtgcaggtctatccgctgggcattggccagttaggtctggaaacgccggagatgaccacccgcgtggggcagaagatccctaaccctacctggacgcctaccgccggcatccgcgcgcgctcgctggagaaaggggtgacgctgccagcggtggtcccggccggaccgaacaatcccctgggccgctatgcgctgcgtctggcctacggtaacggtgaatatctcatccacggaactaacgccccagacagcgttggtctgcgcgtcagctcgggctgtatgcggatgaacgctgatgacatcaaagcgctgttcagccaggtgaaaaccgggacgccggtacggattatcaatcagccggtgaagtttgccgtcgagccggatggtaaacgctatgtcgaagtccacaggccgctttcgcagaccgaaggggaaaacacccggaccatcgcttacacgctgccagcggcgtttcacgccttcgcagaggataaagcagtggatgacctgcagttgaaaaaagcgatgtcgagaagggcggggtatccggtggtggtgtcggctggggcaggtagcacggcgacgtcgctgtcggcgcagaatagttcgtctgacaacggtctgcttacccaatagccctcatgctgagggcaaaaaaaatggcgcacagagtgcgccatttttattaccagaactcttacttacggtaagagtgagcctggttgtccagacgctggttagcgcgagctgcgtcgtctttagcagcctgaacgtcggaacgcattgcgttcacgtcgttgctcagctggtcaactttagcgttcagagtctgaacgtcagaagacagctgatcgattttagcattgctggagcaaccagccagcagagtagaacccaggattaccgcgcccagtaccagtttagtacgattcattattaataccctctagattgagttaatctccatgtagcgttacaagtattacacaaagttttttgggatgagaatattttttttacctgaacgcacttatttttgatcgttcgctcaaagaagcatcgaattgctcagaatcgctgaaaaaggcgagtgaaaacagcgcgcttccatcggattcatcttagataatcccttattaaatagtaaattccgatttgcatttttaataggaagagctaatcaatgaataaaaaaaagcgccccgcgaggcgctttattaaaaaaaaccaattaacctgtaaattattacagcacgtgtacggaagcggtattagtcgtgccgctcggcactaatgcgccggaaaccatcaccactacgtcgcctttacgcgcgaggccgctcttcagcgccaggtctttgcccagatgatagaaatcatcggtagaggcaatctcttccaccagctgcggtaccacgcctttgctcagcaccagctgacgagcggtggtttcgttggtggtcagcgccaggatggtggcatccgggaagtatttgcgcacagcgcgtgcggatttaccgccctgggtggcgaccacgatcagcggcgcttccagtttctcagcggtttctaccgcgccgcggcacaccgcttcggtgatgcgcagtttacggttgtcgttgttgaagtccagacggctggtcatcacgcggtcggtacgttcgcaaatggtcgccatgatggtgaccgcttccagcgggtatttacctttcgcggattcgccggacagcatcaccgcatcggtgccgtcgaggatggcgttagccacgtcgccggcttcagcgcgggtcggacgcggattcttgatcatggagtccagcatctgggtggcggtgataaccactttacgcgcgcggatacatttttcgatgatcattttctgggcgaagataacttcttcaaccgggatctccacgcccatgtcgccacgcgcaaccatgatgccgtcagacgcttcgaggatttcgtcgaagttgttcaggccttcctggttttcgattttggagatgatctggatgttttcgccgccgtgggctttcaggtgctcacggatctcgacgacgtcggaacgtttacggatgaaggaggccgcgacgaagtccacgccctgttcgcaaccgaagatcagatcctgtttgtctttctcagccagcgccggcagggcgatggagacgcccggcaggttaacgcctttgttctcgccgaggtcgccattgttcagcactttacagataactttgttgccttcgatagccgtaacttccatgccgatcaggccatcgtccaccaggacggtgttgccgacggcgaggtcggaggtgaagccttcataggttaccgcaacgatttcgttgttgccgatgacggatttatcggtagtgaaggtgaaggtctggcctgctttcagggagacgtcgttgccgccttccagcttgatggtacggatttccggccctttggtgtccagcagaatagcggctttcttaccggttttgctcatcacattgcgcaggttctggatgcgctgaccgtgttccgcatagtcaccgtgggagaagttcagacgcatcacattcatgccggcttccagcattttggtcagcatctcttcagattcggttttcggaccgatggtgcaaacaattttggtctttttcatgacagttttagtctttaagttgtgaaggatatggaattctcgctccgcgggcgcactgccggggagccaaacctgtattacgaaagttgctaagccacgccctaaggataggtgacaaccctgaagcgtgcagaagaatgtgtgctggcggttcagcccatgaaatgtggcaaggtgttatgcgttttatcatgcagtccaatgcgctgaaaccattcaagaaagaatcgaagcgcattatacgctgccgaaatcaaaaaggaaaataaaaacctcgtttcaaattatggacaaaacgcgtaacaaaaccggcacgttatgcaaaaatctacgcaacacactttttcgtcaccggctatgaaaaagagtaaaagaaatggattatttcgccatcatgagccggtaaaatgcgtcattgaacctttaaagtggcgatggtttgcgttgtgcgggaaatctatcaataatgatttgattgataatgataaaatacgagctaaattctatgggaaataaagcgaaagacgacgacctgtaccaggaaaggtgccgcgtggtgggtaaagtcgtgctggaaatgcgtgacctgggtcaggagccgaaacacattgtcattgccggtgtgctgcgcacctcgctggcgaaccgcaaaatccagcgttcgccgctcaccgtggaggctatggagaaagtcattcatgcgctttccgggcactgatctcttgcgccggcgggtcaggaaatcacgaagcggatcaccgccctgacggcaatgtcacaatggtgagccaccatcgcttcatcgtcgatggcgggtagcggatcgtcaagatacaggctgctgaaggtgtagaagttcgacacctgataaaagctgaagctgctgattaaccggtggacatcgcgcgcgtcgagccccgcctgaaagacgccctgctgctggccgcgcagtaaaatgtcttccagaatcgacagggcggtacgattcagcggcttcagttcacccgagctttttaaccacttgccgcgctgcatattctccatgcaaatgacgcgcatatagtccgcatgggtggcgtgatagcgcacgctccagcgcaccagccgcaccagcgcctccaccggcggcacattctccagccccagctgctgctcggtttcgcggatccgcgcatacacatgctgcagcacctcctgatagagctgttctttgcttttgaagtagtaaaccaccatgcgtttggtggtctgcgcctcggtggcgatctgctccatgcgggcgcctgacagcccgtgttcagcaaagacagcgatagcggcgctgaagatccgcgccttcagggattgtgcttcatcatgggcaacgacggtcatggcaactcctttttcttgggtgacaaaaaatacacataatgatcacaatttagcaacctggtatggcgcaaatgaaccaaatgatacatattcaaggcttacgtcagctgttgacccgaggaccttatgctgcgctctatcgccaccgtttcgatttccggcaccctgcctgagaagctgcacgctattgcggcggcggggtatcagggggtggaaattttcgagaacgatctgctctattatacggggacgccggcggaaatccgccagcttgccgccgatttagggttaaaaatcacgctttttcaaccctttcgcgattttgaaggcgccagtcgggcgcagtttgcggcgaatatggcccgcgctcggcgcaagtttgctctgatgcgcgagctgggctgcgaaacgctgctgttgtgcagcaatgtacagccggactgctcggcggatagcgaattgcaggtcgcggacctgcgggcgctggccacgctggcggaagaggaggggatcgctatcggctatgaggccctggcctggggaacccatgtgaaccgctggcagcaggcctgggagcgggtgcggcgggtggacagcccggcgttgggcctggtgctcgacagcttccatattctggcccgcggcgacacgctggacgcgctaccgtcggtgccggtggagaaaatcacctttgtacagctcgccgatgcgccgtatatgaaaatggatttgctggagtggagccgccacttccgctgctttcccggacagggggagctgccgctggaggcgtttgccgagcagatcacccgctgtggctaccgcggcccctggtcgctggagatcttcaatgacggttttcgcgcctcgccgaacggcgcgacggccaaagatggttatcgttcgctgctgtggctggaggagcaaacccgccgtcggctcccgacgtgcgatgccgatctgttttcaccgccgccgctgccggtctatcacgggctggagtttatcgagtttgccgccagcgccgccgaggcgcagcgcctggggcaacatctgcaggcgctgggttttcagcacgagggaagccaccgctccagacaggtgacgctgtggcgcaacggcggggcgcggatcgtcatcaaccatcagccgcacagctgggccgaccatttttatcaacgccacggggtatcgctctgcgcgatggcgctgcgggtcgagcacagcgcgtcgcttgtcgcccgcgcccgcgcgctgggttatgccacctggcagggcgacgccgggccgaacgaaacgccgatcccggcgatctgcgcccccgacggcagccttatctatctcatcgacgccggggaggctatctacgagcgcgattttcatcctgtatcttctacacatctccgagcccacgcgaacagagaggaacccgtaagccgtcctctgtcgggaacaaaacagaaga

SEQ ID NO: 216 - DNA, 6454 bp, Unknown
  source: /note="Description of Unknown: MKP2_2161_1 Mutant Bacteria sequence"
ttcacgcattacaatgaaaaccacccgcacagcgcgctgggatatcactccccgagggaataccggcggcagcggacatcgttaacttaagatacaaaagctgttcggagatggagggtcaagatcagttagttcaccattattaatttacattgctttgaaagtaaaaaaagatcatgggcctgccatttatggtcacgagcgtataggtaatggcggaaggccttttaaatgtctaaaatttagatctatggttgtcaattctaaagaagtgcttgagcaacttttaaatactgatcctgctgcacgtaaagaatgggatgcgacttttaagttaaaagatgatcctcgaataacggatattggtaagtttttacgcaaaactagtttagatgagctaccccaactttttaatgtacttaaaggtgaaatgagtttggttggacctcgaccaattataaccgcagagcttgaacgttattctgacgaagtcgactattaccttcttagtaaaccaggtatgactggtctttggcaagttagtggaagaagcgatgttgactatgaaacccgtgtctatttggatgcatggtatgttaaaaactggtctatgtggaatgatatagctatcttatttaaaactataagtgttgttttaagaaaagatggagcctattaattgttttttgaatatttgatctaatttaattgtcgagggaataatgaaaatattactagttggaaatcatacttgcggtaatcgaggtgatggtgcaattctcagaggattagtggattctataaaacagatcaatccagatgtagaagttgatattttgagtcgttatgcaaggagttcagcctttttactaggaactgctattaagcaagatgtcctatattcatcaagaatgaataaaaatggtgggcttgttaaaaaagttatttggaagatcaagaatagtattcttcctgatatattagtttcgcatgcaaaaggcaaaggttttttaaagtattttcctttgccaaataatgttgttgaatttattaaagatcttgaaaaatatgatgctgtcattcaggtcggtggttctttctttgtcgatttatatggcactggacagtttgaacatatcttatgttcaaatatagcgggtaaaccaatatatttagttgggcacagtgttggtccttttgagaatcctaaattccagcatatcgcaaaatattgttttactaaagcagagaagataatactacgtgaagatgttagtttatctttgatggaaaaggataacttcaacttaaacaatgtaacattgggtgttgatacggcttttttggtggatacagaaaaagatgttaatgattatgctgtttctcattggaaaaagataattaaagaacagaaaacggtagctttaacagttaggaaactagctcctttcgataaacgtttaggtgtttctcaagatgactatgaggcttcaatcgcccgtattgttgattatttgaaccaattaggttatcaggttataatattttcaacatgcactggcattgaaagttatcatagtgatgaccgaatggtagccctttctgttaaaaataaagttcatgatagtcaatgttgccatgtcgtaatggatgaattcaatgattatcaattagggattttattatctaattgcgtctttacaataggtacaagattgcattctgctatcatttctatcaattttggaacacctgcaatagcaattaattatgagcataaatcgttgggtgttatgcgtggattaaaaatggatgtgctatcagctgatgttagcgatgtcattgatgggacattgattaataaaatagaagatttaattgctaatatggctgatattgaaaattccttaaaaaataacttacaagatgcaaaaataattgggcgcacaatgattgaaaacattctttctgagattgatagataatgaaaatactttttttttgtattcgattcccactcgcttctgaaacttttgttttaaatcaagttatttcctttattaaaaagggttatgatgtaaaagtattgtctttatatccgggagatactgaaaaagtacatggcgattttgaaaaatacaacataggtgctcttatagaaaatatttttgacgctgatgaaataccgggtaataaattatcccttatcttctcgagagcaaaaattgttttaaaatcaagttcatttagtattattaaagcattcaactttgagagatttaaatttttatcctactcattattattacctgcgatttttgcaaagttaaggaataataaaatttcaacggatgttataattgctcactttggtcattgtggtgtgcttgctaacgcaatcagggatatcgggttaattaatggtaagcttttgactgtattccatgggtatgatatttctacaattagccttcttaaaaaatataagattttatataaaaatttattttctcagggtgaatacttcttacctataagtaacttatggcgagataagttaatcagtatggggtgtgataaagataaaatatcggttataagaatgggaattaaaatagacgaatttaaatatgaatttcatgcacgtgatcaatcaactttaaacattatttccgtctgcagattaactgaaaaaaaagggctggtatatgctattgatgcttgtaatgcgcttaagaataaaggatgcaaatttaaatataaaataattggttatggagaattagagaatgtgctagccgaaaaaattaaagcactaggacttcaggattatgtctatcttttaggatttcagccacaatcagtagtaaaaacagctcttgctgagagcaatgtctttttgcttccatccgtaactgctagtaatggtgatatggaaggaatacctgttgcacttatggaagcaatggcgtcaggcttaccagttatttccacttatcatagtggtataccggagttaattgatgatcataagaatggttatctttgcccagagcgtaattctgaagctatagcaaaaattttatatgaaatatatgaaggaaaagataatctatcattaattgcttctgaagcgcgtgataagatttattctcagtttaacgaggaggttgagttcaacaaaatcgtcactttgctggagagcattaaatgagtggcattaaaaaacaagcaatttggttattaggatccaatacaatttctgccattcttcagattctacaaattagtttgctagctcaccatcttaaactaagtgagttaggagtactagctatagtcaatatggtattgatggttgcgatgatcttgcaggatatgggaatgagcagttatatagttcatatgcaagaaatgacaagaagagatcagagtactatttattggatcaacctgttacttagtttcctgacagggtgccttgttttcgttgcgtcttggcctatagcaactttttacaatatgcctgacttaacttttttagtaatgttggcaagctttaattttctttttctaggatctctatcgcaatatcaatcgcactacataaaagcaaaaaaagttatacttttggctaaaatagaaatcatttctaaaattatttcttttttattcgttttgttctcaattttaaagatggaactgagaactgaggctgtgatttatggtctgattattaattcttttgctcgtctttttttaatgtcattattaggtgataaatcttggcgacctacttttgagtttaattctgctatatgtaagccggtttttaaatatgggatctttcaattaggctcacagattctaaatcaatttcgcacacaattagatgttattgtaattggtaaaatgctaggtgcggattcacttgggttatattctttagctaaagatctcatcatgcaacctctaaagctgattagtcccgtaataaatagattggctttgcccagatttgcagaggttcaaaatcaatctgataaacttggtggtgcatatctgcgtggaacatctgtaattctgttgtttagcatgataacttttttctctatttatttgttggggccagttataatcaaaattttatatggttcaagtcgcatgggggtttttaatattctaccatatatgcttttgtttggtgttttaagacctatgggtgggttaacaggcgctgtggctcaagcaaatggcaagactaacattgagttcagatggaatgttatagcaacttcgattgttttgggtgttactactactgttttttttattcctcagttatggtatgtttcgttaagtctttcactttctcagttattgattagtttttttgtttttccttgttttataaaacctattgtagatgtgagttttaaatcatatttatataaatggtttccacaagctttatgctttatatgcttgatttatattgtcaagttttttgatctcgtgctttaccccttttggtgaatttcagaccaaaaattttaaaagcactaaacatctaaagatgtcctttgccatacgttgaccttacgttaatattatatgtactttaccctgcgagaatttcgcatagagcacacctgacaggagtatgtaatgtccaagcaacagatcggggttgtcggtatggctgtgatggggcgtaaccttgcgctgaacatcgaaagccgtggttataccgtctccgtttttaaccgctcccgtgaaaagaccgaagaagtgattgccgaaaatccaggcaagaagctggttccttactacacagtacaagagtttgttgaatccctcgaaacaccacgtcgtatcctgttgatggtgaaggctggagctggcaccgacagcgccatcgattccctgaagccttacctcgacaaaggcgacatcatcattgatggcggcaataccttcttccaggacaccatccgtcgtaaccgtgagctgtctgccgaaggttttaactttatcggtaccggtgtttccggtggtgaagagggggctctgaaagggccttccatcatgcctggtgggcagaaagaagcctatgagttagttgctccgattctgaagcagattgctgcggttgctgaagacggtgagccatgtgtcacctatatcggtgctgacggtgctggccattatgtgaagatggttcataacggcatcgagtatggtgacatgcagctgattgctgaagcttatgcgcttttgaaaggcggtctggcactttccaacgaagagctggcgcaaaccttcaccgaatggaacgaaggtgagttaagcagctacctgatcgacattaccaaagatatcttcaccaagaaggatgaagaaggtaagtacctcgttgatgtcattcttgatgaagcagcaaacaaaggtaccggtaagtggaccagccagagctcactggatctcggcgaacctctgtctctgatcaccgagtctgtatttgctcgttacatctcttcgcttaaagaccagcgtgtagctgcttcgaaagtgctgagtggtccgcaggctcaaccggccggcgataaagcggaatttatcgaaaaagttcgtcgcgcgttgtacctcggtaaaatcgtctcctatgctcagggcttctcccagctgcgagctgcttctgatgaatacaactgggatctgaactacggcgagatcgctaagattttccgcgctggctgcatcattcgtgcgcagttcctgcagaagatcactgatgcttatgcgcaaaacgctggcattgctaacctcctgctggcgccgtacttcaaacagatcgctgatgactatcagcaagcgctgcgtgatgtggtggcttatgccgtgcagaatggtattccggtaccgacgttctctgccgcgattgcctactacgatagttatcgttccgcagttctgccagctaacctgatccaggctcagcgtgattactttggtgcgcatacctataaacgtaccgataaagaaggtgtattccataccgagtggctggaataaatttattcaaacagtcaggccatttggcctgactgtttttaattttatatttaatgttgcaacctgaccttaagcattacctttctaaaaatatttctaatatctaattttaatctttttaagaatttgccatatttattatcttgtacgcctatattaatctacttctggcctcagtaaattactgggtgttaaataacagggttttaattaaaggaaattaatatgttacttcctgtgataatggctggcggtaccggcagtcgtctctggccgatgtctcgcgagctttacccgaaacagttcctccgcctgttcgggcagaactccatgctgcaggaaaccatcacccgactctcgggccttgaaatccatgaac

SEQ ID NO: 217 - DNA, 6316 bp, Unknown
  source: /note="Description of Unknown: MKP2_2161_1 Mutant Bacteria sequence"
tttacgggcttcttgccctaacaggatcccggtcatctcaaaattggcgttagtgttagacatatattcaagcctatctcttatctggagatacagctactgtccggtgtttcagggggctacatcagttcgctctgaatcgctcctggttcagactgaatctgtcaagactgctgcaaagtcacatttgaatataggagacagtccatgtactaatgaaaatatcctacatcttcgggttgtagtatggccctatccgttgattaaagatgttggctacatcataaaaggagaattagcctgtagtgctctgtgggggagtttacgtcccaccttaagtctggaacattttgataaaaaatggacttcgcgggaaggagtgtggctttttggtattaagcttatggatgatatatccgtcaatggatatatttctgaaggtattatggtgaccctatcaccatttgtcttcagacgattcgaaactgatatgtattcaaaaaactttagcgctgttgtcggaaatagtaagcatgacaggcattacttcaatataggacctgatgctcctcttcttgatcggcatgatagcgttccactaaggtttagagtgtttagggcatgtagcctacattatgatctctgtgttgcaggaggtgggtattttacggggatattttcagagcactggagcatacaaatgttattagtaacagtgtcactactttccggtttaatgatttatattatcattatgaacagagcagaactcaatagttcactatctgcaaggtttgtaaaggctttgaaaaatgaagtcctgtcgctggtctatcaacctatttacagaattgaagacggacagatctgcggatttgaggccttgctcagatggaaagatgaaagactcgggaatattagccctgaagtatttataccgctttctgaaagggaagggttgcaggaggatgtgactttattcgtcattaaccatgctatccgagaatttatccatactgctattcagaatgaaatatttttgagcgtaaacattaatccaagcgatcttgattcagaaaaattcagggataaactactaggattaatttctgaatataacatcccatataaaacaatccttcttgaaattacggagcgtcaaggaggggattttgaaggtatgaaaattcacattgataaatataaaaatcatggtgtcaggtttgccatcgatgactttgggacaggatattctaatcttaatctggtaactgcgcttgatgtagatgaaataaaaatagacaaatcgctaactagtgctattggtactgaatctttacgatatgatcttcttcccggactgcatgagatgttccgctccattgcagataagattgtgtttgagggtgtagagactcaggagcaggtgaactatctgaagacgttctggccacagagttatgctcagggctggtattactccagagcgcttccgctggaagaagcgagaaaacttaccatccgggaattgaactgaccggcactttcagcgcaaacactcagcaattgcttgccgatcagctggtagaaattgaagggcagtgtaatcacctgctgctggcgcaggggaaagcgttactgaaaagtcgttctgaactgcttaaataacagagaaaccaggatgtgatttgatgcaaaacacggaacagcgaatgtaatatttactgagatgagcgagctttgtctcatagtacagaggagtcggggctgccagtatccggtagacagcattattcgtctgcaacataactctgctggttgctgcggataactactcagcgccttccagagatggcattgatgaaagtagtagaaaaaacctggaatctttgaagatgtgtccctacctcagggggctggagtgccatctggccctaattcagcacagtgctgcagatatgtgttatgtacaagtagacactgtcttgaaaatcagaagtcgttgagggttgaatgcaattccaatatttgcttcagcagataacgaggaccgctatctattgcatctagtgaataggaagccgtttccatttttctctaaagcaactggtgttgacatcctgaattccttcaaatgtctgatattccttttttcaaagcactagaaaaatacccgaaagctgttaatctaatacattgactgaccatacagtacagcgttattttgttgggtttacttcacgtactttttattgtcggatactgttgggaaaagacacaaagaagcaagccattaagcggaatactgcgtagggttagaatatacaattaacttttccgtgataggactagtgataacaatatttccagcatgggctgacaggagtatagatggaactgctctccataggttaatacatctcgcaattaacacgcccgcatatgccacaaaactgacgcccattctcggaattttttttgccattatctttcctgcggcctaattactttccccacaactatggttttttattagagtcttcaccactaaataaattataataaattgattttattagacatctgtcagaatctatatggtcagcacgtattgcatgctctaatgtttcaaatgctaaattatgcgcggcctcagaaaatatcccaggccaacccttactcagcatagacagtcctttaaggactcttatctgtatctccctcataccggcaccatcgcgcgcgacaggtgagaaaaagtcttccagtagatcgttattctgaagtggtgcaacatgaactgaaggatatttcacttctatttcatcagatttattctgcgcgtaagtggaaagtatacgaacacctctgccaatgacatcaatggcggttccaggatcgttcactgcgggggaaagtgcccggcaggctatttcggccatgacgctaagacaaaatcggggatcctgagcaaatgaacgtacatccgagacaataatcgtctcaagtaaatcggcgctgattgatgactcctggccttgactcaggtacaaaacgggcatggatggatggatgaaactgcctggctgcgccacgaggtatacatgacggggatcattggtcagcagcttgctaagtttcaccatattaatatattcaacatagccaatcttcttcggataaactgcaaccgttcctttcggctgttcattgttctcaagccatggatatccgccgagacagggatttcttgctctcgcaataaatgtttcgatggccgcctgttctacttttgccgttgtctcacctacccttcccagagaggtcaaatgctgtatccagcgaagcaatgtgatgaggattaaggcaatgacaaccagtgtgacaatgaataaaatgactctccccctttctccataagctcccatactgagggcaataatccctaccagactgaagagaaaagaaccgatgaaggtggccagtacattttgtgtggttacgtcttcaacaactaaacgcgtagctctgggagtcacattagtagtggctgaaccgtaggctgtgaccatgatactcaacgaaaaagtggtcactgccagcatactcgatgccagtatgttcagaatgttatcgactgcttccgcaccaaccttcacggaaaccgactcaggtatcattgatttaaaaagaattgataaaagggccgttattatcgcgacaatggcgaataacgttgccctgaaccatagctttttaactgtctgcttcagaatccatttccagcgtgaaatcattctgcattcctcatattgcggccgggataaataattgccgcccccaggacggcatgttgctattaacgaacgaggtgcaggaagtgcagatgtttttcgtactggtccagtatgtcattaatcagctgctcctggttccagcccatcacatcataattttgaccgccttctttgagatatacctcagcgcgataatatctatgttgttcagtctgctgctcattattatccatcgcggcgagcgcgaaggtcggtgagctatacccgcgaagcctcacttcatatataaaattcagctcgttacccaaatcgacttcaagacgaatacgatcctcgactgcgtcactgatgtggcttatcgtcccctgcttgttcagctcttcctgaaccagcgtcatggcgggctggatgacgtcgtccataaaacgtttcacaagagatcgcttcggcagatacgcgatattgcgtaaccttctctgccagggaattgggttacgtgcagccgtaggagcaattgtcgccatgctcaggctttcacgcttggtcaaatcccggcgcaaagcttttaaaagtccgtatatggatatcagtaagatcactgagaaaggcaatgcactcgctattgtcactgtttgcagcgcacttagccctccggcaaggagaagcgcaattgcgacaatgcccatgagcgaggcccaaaatattcgctgccagacgggtgtgtttgccactccacctgttgccagagtatcaactaccattgcccccgagtcagcagacgtgacaaagaagacgatgaccatcgccattgcgatgaatgacagcacggaagagaacgggaaatgctccaggaaattaaacagggccagcgccacatcctgctgaacagtattggcgaggtctgtggccccctggttcataatgagatagatcgcgctgttaccaaacactgtcatccacattagcgtaaaacccgcgggaacaaacagcacgccggtgacaaactcgcgaatggttcgcccgcgggagacccgtgcgatgaacatccccacaaacggcgaccatgaaagccaccatccccagtacagtaatgtccagccccccagccatttgctcgacttaggctcatacgcgtaaaggttgaacgttttactcaccagttccgaaagataaccgcccgtattttccacaaatgacttcagcagaagcacggttggtcccagacacaggaccagcgccaggagcaacaacgccagacccagattgagctcagacaggatacgtattcccttatccaggccggacaccactgaaatcgtcgctaaccccgtgatgaccacgatcagaataacctgcaccgtttcattgatgggcaccccgaaaagatggttcaaaccggcattcacctgcaaaacgccgtaacccagcgatgtcgcgacgccaaagaccgtgcctataacagcgaaaatatcaaccgcatggcctacaggcccgtatatgcgatcgccaataatgggatagagtgcggagcgcagagttaaaggcagaccgtgacggtaactgaagaacgccagaatcagcgccacaatggcataaattgcccatgcgtgcagtccccagtggaagaaggtcagacgcattgcttccttggctgccgcaacggtttctggcgtgccaacgggaggcgaaagataatgcattacaggttcggcaacgccaaagaacatcaggccgatccccatccctgccgaaaaaagcatcgcaaaccaggaatggtagctgaaatcaggctgcgcatggtccgggcccagcttgatatcaccgtagcgtgagagtccaaggaacgtgacacttagtaaaatcagggccacagcaaggatgtagaaccagctggcattcgtgaagatttgttgctgtagtagtttaaaatttttgtcggcgacatccgggaatacggcggcaaaggcgacaagaaggaaaattagcaaagcagatgtaaagaataccgctttgttaatctggcttgtagacttcttcgggattgtatcattatcactcataatcatttattccattaattaaatccgcactggatagacggtactacctttcacagagtagcaaagttcaactggctatgcggcgttaatcggaacgcatggtgtaatgagttccgatacaaatcatccgatattcggtaatgactccaacttactgatagtgttttatgttcagataatgcccgatgaccttgtcatacagctccaccgattttgagaacgacagtgacttccgtcccagccttgccagatgttgtcgcagattcaggttatgtcgctcaatgcgctgagtgtaacgcttgctgataacgtgcagctttcccttcaggcgggattcatacagcggccagccatccgtcatccataccacgacctcaaaggccgacagcaggctcagaagacgctccagtgtggccagagtgcgttcaccgaagacgtgcgccacaaccgtcctccgta

SEQ ID NO: 218 - DNA, 6247 bp, Unknown
  source: /note="Description of Unknown: MKP2_2161_1 Mutant Bacteria sequence"
gctggcgtgcggcggcgtcttcctcaatggctactgcgccagcgacgcccgcgtggccttcggcggcgtgaagaagagcggttttggccgcgagctgtcgcattttggcctgcacgagttctgtaatgcgcagaccgtctggaaagaccgtcgctaatcaacgttagcccctgacgaccgtcgtccacgtctgctatactcgcccaccgaattttgatggtgggcaaggagccgcgtgtggcgacggtaatcaataatgcaatgctggaagccattctggcagaaatcaggccgctgattggccgcggaaaagtggcggattatattccggcgctggccagcgtcagcggcgacaagcttggtatcgcgatcagtacggtggacggtcagcactttgccgctggcgatgcccatgaacgtttttccatccagtcaatctccaaggtattgagcctggtggtggccatgaaccactatcaggaggaggagatctggcagcgggtggggaaagatccttccggccagccctttaactcgcttctgcagctggagatcgagcagggcaaaccgcgcaacccgtttatcaacgccggggcactggtggtctgcgacatgctgcagagccggctcagcgccccgcgtcagcggatgctggagattgtccgccgtctgagcggcgtggccgatatcgcctacgatccggtggtggctcgctcagagtttgagcattcggcgcgcaacgccgccatcgcctggctgatgaaatcctttggtaacttccataacgacgtcgccaccgtgctgcagaactatttccactactgttcgctggagatgagctgcgttgagctggcgcgaacctttctgtttctcgccgaccgcggcattgccccgcatctcgacgcgccggttattgcgcccatccagtcccgccaggtgaatgccctgatgatgaccagcggcatgtaccagaacgccggtgaattcgcctggcgcgttggcctgccggcgaaatcgggcgtcggcggcgggatcgtggcgattgtcccgcaggagatggcgatcgccgtgtggagcccggagcttgacgacgccgggaactcgctggccggcgtggcgatgctggaaaaactgactcagcggatggggaggtcggtgttctgatggtcgatcaggatcgcttgtttgcgcgcctggcgcgctcgacgtttcgctcacgcttccgtctgggggggaaagagcggcaatattgtctcgataagggaccggaggtcattgatcggcatgccgcagactttattcgccagcggctggcgcccgctgcgccgatcaatgatggcaagcagacgccgatgcgcggtcacccggtgtttatcgcccagcacgcgaccgctacctgctgtcgcggctgcctggaaaaatggcatgccattccccacggccgcgcgctgagcgagccggagcaggactatatcgtgcaggtcatccaccgctggctggtgctacaaatgaatgcgccgtctgtgcgctaatttgcatttgatcggcgccggagtatgcctgataaatattctcatgttatgataatccgctaactaactattaacataataatttcctgaaacaattagacggataattactgaatgtcttcactgtcgattcggtcatttacgctgtttcgtgaagaacaacccgtgcgcgatgcattggtcttatttacgttaacgctactgctgcattttcttggcgctatgctgcgtctggtgcaggagctctctttcttctggccgctcaatgcagtgatggccgggatttttgcacgctatgtatggcttaaccgcagctatttttatgccgtctgttttgcggcaatgctggtctatgatggattaacctcgcgctggggtatgggctttgcctcattgctgattaacttttccaatattgtctttattgtgacgctagcgcagctggtgctgtgggataaacgtcgcgccgactccatgccgggcccgataaacgcgcttaatttattctgtttctgcctgttagccgccttactgtgcgcagcggtcggcgcgctggggtcggtggatgttgaacgcgccaccttcgttccccagctggcggactggtttagcgaacagttctcaacggcggtattaatcctgccctttattctgaccctgacgctgccttcggcattaagcggttttcgctttcgccagctgctgccggtgctggcgctggtcctgtcaattgcgcttggcgtggcggtaggcggcgcgggcagcattaccttcccgttaccggctttgatctggtgcgctgtacgctatccgctgccgctgacctgtctgctgacttttctcactggcatcggcgaaatactgctggtcgctaattcgttaattcacttttcgccagatgcgcgaatgcagccgtggcagctgttctccacccgcctcggaattgccgccatgctgattagcccggtgattgtcgcatccagtgtcgaagcgattaacacgctggtgaagcagctggccctgcgcgccgattttgactttcagacccgcgtctattcccgttccggactgagcgaagcgttgaagcgtcagacgctgccggcggataagctgctgacggtgatggtgctggatatcgatggcttcaaacgggtgaatgatgctctgggccatgaaggcggcgattgcgtgctgacccagtttgcccagcaggttcgacagctggtgggtgagcaggggatggtggcccgtatcggcggcgaagagtttgcggtggccgccgtcgtcgacagcgcccagcagggctatttgctggcggaaaagatccgtcacggggtggagtcgcagcctttcggcctgggccagaacccgatccacctgaccatcagtctgggactggagacgcgcgaggtaggccacgcccgcatcaccgagctgtttaaccagctgctgttggcggcggacgatgagatggtgaaagccaaacagagcggtcgtaaccaaatttgtatgccgacgctgaccgaaagcgcgccataagaaaatcctatcgggatcctacttgtgctaatttttggttaaaaacatagtgatgtggtcgataacagggagcttttatgaccacatccttttcactgcgcacgctctcgcgtgacgatattctccatcacctcccggcattaagcgagatcctggcaagctgcgtcaacggcggcgcctcggtgagctttatgctgcctttcgcgccgcaaacggcgataacgttctggcaacgcactgccgacagcgtggcggccggggagcgcattgtgctggccgccttcgacgcggaggaacgtcccgttggcaccgtgcaacttatcaccagtcaaccggaaaaccagccccatcgagcggatgtcgccaaattattggttcaccaaaatgtccgccgcaagggggtcgcccaggcgttgatgagcgagctggagcgcattgcccggcgggaaaggaagacggtgctggtgctggacacggcgaccggcagcggggcggaacagttctatgcccgctgcggctgggaaaaagtgggggaaattccgcgctatgcgctgatgcccgacggcgaaatgactgccacctcactattctataagtttctgccctgacggccgctattgcagattgctttgatcaaaacagggtttcactggtagaaaaacctgataacttattggaccaattactcaggttgtatgactactattagagggaacccattgtgaaaactttaaaccgtcgtgatttccccggcgcgcagtaccctgaccgtatcatccagtttggggaaggtaacttcctgcgcgcattcgttgactggcagatcgacctgctcaacgagcataccgacctgaatgcgggcatcgtggtcgtgcggcctatcgccacagattttccgccttcgctgaacacccaggatggcctgtacacgactattattcgcggcctgaacgagcagggcgaagcggtcagcgacgcgcgtcttatccgctcggtcaaccgggagatcagcgcttacgcagacttcgacgcttttttacgcctggcgcataacccggagatgcggtttgtcttctccaacaccaccgaggcgggcatcagctaccatgccggggatcggtttgacgacgcgccgccggtcagttatccggcgaaactgacccgtctgttgtttgagcgttaccagcatttcgccggtgcggccgacaagggatgggtgattattccctgcgagctgatcgattataacggcgaggcgctgcaggcgctggtgctgcgctatgctagcgaatgggaactgccgcaggcatttatcacctggctgacctcagcgaataccttctgttcgacgctggtggatcgcattgtgaccggctatccgcgtgatgaagtggcggctctcgaggcgcagaccggctataaagatgctttccttgataccgctgagcatttctacctgttcgttatccagggacctgcctcgctggaggccgagctgcgtctcgataaactgccgctgaatgtgcgcattgtggacgatatcaagccgtataaagaacgcaaagtggcgatccttaacggggcgcacaccgcgctggtgccagtggccttccaggccgggatcgacaccgtgggtgaggcgatgaacgatgcggagatttgcgcgtttgtcgaaaaagcgatttatgacgaaattattccggtgctggatctgccgcgcgatgagctggtgtcattcgccagcgccgtgacagggcgcttccgtaatccctatattaaacatcagctgctctcgattgcgctcaacggcatgaccaagtaccgcacccgtattctgccgcagctgctggcggggcagaaagcgcatggcgcgctgccgccgcgtctgacctttgccctggcggcgctgatcgccttttaccggggagagcgggatggtgagagctatccagtacaggatgacgccgactggatatcgcgctatcaaacgctgtgggcccgccatcgcgatggccagatgagcactcgcgagctggtcaccgccgtgctcagcgtggcggatcactggcagcaggatctgagccagatcccgggattggtggagctggtgactgccgaccttgacgctatcctgacctgcggtatgcgcgacgccgtcaaacctctttgctgatagtccatctatacacccggctgcggccgggttgtgcaggatttttattagttacaacatactattatactaacctgtaacagccggtcagtggctcctctgcatacggctttttagtgccaaatcgttccgaacagcaggagaattatggccgaagcgcttgaacaaatatctgcgcaggaaaataatgacctcaactcatatctcctgccaatattcgcaggctaatgcattcatctgtaaggaaactctcatggtcatcgatatccgggaagtacggccccacgacaaagccgaatggcttcagctttggcaaggctacactcgtttttacggtagcccgcagccggaagaggtgaccgaatgcacctggcagcggatgctggatgtaaactcgtctgtattgggtagagtcgcggtggtggatgatgcagtggtcggcttcgctatctgtgttcttcatgagggaacctgggttaccacgccgatctgctatctggaggatctgtttgtcgatcccgccttccgtggacagggtattgccagaaccatgattaagtcgctgcaaagcgaaggggcggacaaaggctggtcgcggctgtactggcatacgcgccgtgataatcccgcccgtcatctgtatgatgagtttaccccggctgacgattacgtacgctacaggatcacgcttgagtcctgaagcggtaagaggttgttaagcttttcccgctataacaggggaaacaggctcaggagaagcaacgatggaaaaacgtcttgaaacagtggtcaatgtgattatgtttctttcgctattggcaacggcctgggatctctcgctggtgcatcatctcgcgtggtagtaaattatatcatctgaaacgcggcgcctcttgcggcgccgcctgtctcattcatccgccatcttccctgcgctaaaactccagtcctccagttggttaaactggataaccaccatcacgtcctgcgggctgaccgccat

SEQ ID NO: 219 - DNA, 6175 bp, Unknown
  source: /note="Description of Unknown: MKP2_2161_1 Mutant Bacteria sequence"
cttccgggaccgcctggtcgatcaaaggcaaggtcgtcggcaaaggccgcggcggcaacgccttcgccccggaccgctcggacgacttcccgctgccggcgcagaaaaacacctggtcggcgcagctgtttgaaaaagcggcgctggaagtggggtatcacccctataacctgccgtcggccaacacctccgactcctataccaacccctacggcgcgcagatgggcccgtgcaacttttgcggtttctgcagcggctacgcctgctacatgtactctaaagcctcgccgaacgtgaacattctgccggcgctgcgccaggaaaaacgctttgagctgcggactaacgccaacgtgctgaaggtcaacctgaccaacgacaaatcccgcgccaccggcgtgacctacgtcgacggccaggggcgcgaaatggaacagccggcggacctggtgattatcggcgccttccagttccacaacgtgcacctgatgctgctctccgggatcggcaaaccgtacaatccggagaccggcgaaggggtggtagggcgtaacttcgcctaccagaacatgaccaccatcaaggccattttcgacaaagacacctataccaatccgtttatcggtgcgggcggcaacggcgtcggcgtcgacgacttcaacgccgacaacttcgaccacggtgcggcgggctttgtcggcggttcgccgttctgggtcaaccaggccgggaccaagcccatctccggtttcccggtaccgccgggcaccccggcgtggggcagcaagtggaaagcggcggtggccgatacctacacccatcacctgtcgatggatgcccacggcgcgcaccagtcctatcggcagaactacctcgatcttgatccgaactacaaaaacgtctttggccagccgctgctgcgcatgaccttcgactggcaggaaaacgacatcaagatggcgcagtttatgttcgataagatggcgccgatcgctaaagcgatgaagccgaaatatatcctcggcagcccaaaaaacgccaacagccactttgataccaccacctaccagaccacccatatgaacggtggggcggtgatgggggaagatccgaaaaccagcgccgttaaccgttatctgcaaagctgggacgtgcataacgtcttcgtcatcggcgcctccgcgttcccgcaggggctgggctacaacccaaccggcacggtggccgcgctggcctactggtcagcgaaggcgatccgtgagcagtatctgaaaaatccgggtcccctggtgcaggcataaaggaaggcagatgatgaaaatgcaatggttatcggccctggtgcttggggcattgagctgcgcggccttcgccgaagaggcgcctgcggacagcaatctgattaagcagggggagtatctggcgcgggcgggggactgtgtcgcctgccacaccaacggcaaagcggggaaacctttcgccggcggtttgccgatggagacgccgatcggcaccatctactccaccaatatcacgccggataaagaacacggcattggcgggtacaccttcgaagagttcgacgacgcggtgcgcaagggcgtgcggaaagacggttccacgctctatccggcgatgccgtatccctcgttcgcgcggatcagcgaagcggacatgcgcgccatgtacgcctactttatgcacggcgtggagccggtgaatgtcgccaacaaggacaccgacatcccatggccgctgtcgatgcgctggccgctggcgttctggcgcggcatcttcgccccgacgccgagcgactttgtcgccaacccgcaggttgacccggtgctcgagcgcggccgctatctggtggaaggtctgggccactgcggcgcctgtcataccccgcgtagcctgacgatgcaggaaaaagcgctcagcgaaagcgaaggcgatgattacctggcgggcagcaatgcgccgattgacggctgggtcgcctccagcctgcgcggcgaaaaccgcgacggtctggggacctggagcgaagccgagctggccgagttcctcaaaaccggacgcaacgataaatcggtggtcttcggcggcatgagcgatgtggtggagcatagtctgcagtatctctctgatgacgacatcaccgccatcgcccgctacctgaaatcgctcccgccgcgcggcggcaaacagaccccagccccggtggaagacagcgtggcgaaagatctgtggaagggtaacgacagtaaaaccggcgccgcgctgtacgtcgataactgcgccgcctgccaccgcaccgacggcgtaggctataagcgcgccttcccgtcgctgaagggcaatccggtggtccagaccgaagatgccacttcgcttatccacatcgttctgaccgggagcaccacgccggcggtgaaagatgcggtctccaacctgaccatgccgtcgttcggctggcgcctggacgaccagcaggtggcggatgtggtcaatttcatccgcaccagctggggcaacaacgcgccggcggtcagcgccagcgatgtggcgaaggtgcgtaaggagaccgcggcgcacgatgagaaggcgttaggcaacgccgatatctcgaagctgccggaggccggacagtaaccgtcagggttgcgtcgcccgcgcggtgcaacccatacttagcgacgacgtaaaatactgtctgaatcaaggagtttgccttcatgctgcatgcagagcgactgacctgcatcgttgacgatcgaccgctgtttgcggcgctgacgctgtccctcgctgccggcgagctgctgcaggtcgccggtgataacggcgcggggaaaacctcgctgctgcggatcctctgcggcctggcgcgcccggaaagcggggtggtgagctggcagggccagccgctggcgaaggtccgggagtcatttcaccgtcagctgctgtggctgggccataaacccggcgttaacgcggcgctgaccgccgatgaaaacctgcgtttcttctttccggccagccgccttcagcagcgggaaagcgccctcgccgccgtcggtctggcgggctatgaagatctccccttgagccagctctccgccgggcagcagcgtcgggtggcgctcacccgcctgtggttaaccgacgcgccgctgtggatcctcgatgagccgttccccgccctcgacgccacggcgatggaaaccctgacccgtcgcctggagcagcacgcccggcaggggggatgcgccatcctcaccacccaccagccgctgcggccgctgggctgtccgttgcgcaccctgcgcctcggcggcgaggctggaggcgggcaatgatgcgtgcgctgttggcccgggaactgcgcctggcgtggcgcagcggggcggagatcctcaatccgctctggttctttctgatcgtcatcaccctgtttccgttcggcgtcggcgccgcgccgcagctgctggcgcagattgcgccgggcgtggtgtgggtcgccgcgctgctggcggcgctgctggtgatggatcggttgtttcgcgacgactggcaggacggttccctggagcaactgatgctcctgccgacgcccctggtggcggtggtgctggtgaaggtggttgcccactggatgatgagcggcctgccgctgctgatcgtctcgccgctggcggcgctgctgctggggatgagtctgcatgacgccggtgtgctggcgctgaccttgctgctcggcaccccgacgctcagttttctcggcgcggtgggggttggcctgacggtcggcctgaagcgcggcggcgtcctgctgagcctgctggtgctgccgctggcggtgccgctgctgattttcgccaccgcggcctgccaggcggcggccgccgggctcccggtcagcggctatctggcgatgctggcggcgttcttaaccgccagcgccaccctgtgtccgttcgccaccgccgctgcgctgcggctgaccgtgcgataactcgctgcgcctgcgggcgcggccatcataaccgtgtgagtaagcgtctatgtggaaagcgttacatcaactggcgatccccgagcggctgtaccgcctgtgcggatgctggatcccctggctggcggcgttgagcgcgctgttgctggtcatcggcctggggtggggctttggcttcgcccccgcggactatcagcagggggaaagctaccggatcatgtaccttcacgttccgacggcgatgtggtcgatggggctgtacctggcgatggccgtcgcggccttcgtcggggtggtctggcagatcaaaatggccgacctggcgatcgccgccctggcgccggtgggggcggtctgcaccctggtggcgctggtcagcggcgcggcatggggcaagccgatgtgggggacctggtggatctgggatgcccgtctgacctcggagctggtgctgctgtttctgtatgccggggtcatcgccttgtggcacgcctttgacgaccggcggctggccgggcgcgcggccgggatcctcgtgctggtcggggtggtcaatctgcccatcattcattactcggtctactggtggaacaccctgcaccagggctcgaccaacctgcagcaaaccatcgacccaagcatgcgtctgccgctgcggatctgcatctttgccttcctcacgctgtcggtcaccctgaccctgatgcgcctgcgtaacctgatcctgcaactggagcgccgtcgaccgtgggtggtggcgctggtgaataaaggagccgcccgatgagccccgccttttcgtctttcgccgccttcctgaatatgggcggctatgccgtgtacgtctggctggcggtggccgtgaccgtcgccgcctttggcctgctgacggtgcacactctgtgggcgcggcgggcgctgttccatgaggtgcgacgccagcaggcgcgcgagcggcggatcgctgccgcccgcgaacatgacaaggaggccgcggatgcaagcgcgtcgtaaaacccggctgtatatcgtgctggcggtgctcgccggcctcgggctaaccgtcagcctgacgctgtacgccctgagcagcaatatcgatctgttctacaccccgggggaaattatctacggtaaaacggaaacccgggcgctgccccataccggtcagcgcctgcgggtggggggctacgttcagccgggctccctgcagcgtgacccgcaaaccctcgacgtgcgctttaagctgtatgacgcccgcggggtcgtggacgtcagctataagggcattttgccggacctgtttcgtgaagggcagggcgtggtggcccagggcgtgctggacggcgagcggcatattaccgcccagcaggtgctggccaaacatgatgaaaattacacgccgccggaggtgaaaaacgccatgacgccggagaaaacgggggcgcagccatgatgccggagctgggcaactttttattgtgtctggcggcggggctggcgctgctcctgagcgtttatcccctgtggggcgcggcgcggcaggaccggcggctgatggccctggcgcggccgctggcctgtggcctattcgcctgtatcggcggcgccttcctgctgctggtgcacgcctttgtggtcaatgactttaccgtccgctacgtggcggaaaactccaacagcgcgctgccggtgtggtatcgggtagcggcgacctggggggcgcacgagggctcgctgctgctgtgggttctgctgctcagcgtctggaccttcgccgtcgccctcttcagccgccggatgccgctcgacgccgtcgcccgggtgctggcggtgatggggatgatcgcctttggtttcctgctgtttatcctcttcacctccaatccgttcagccgcggcctgccgcagtaccccattgatggccgcgacctcaatccgctgctgcaggatatcggcatgattttccatccgccgatcctctatatgggttatgtcggcttctcggtggcctttgccttcgccatcgcctcgctgctggcgggccggctggatactgcctgggcgcgctggtcgcgtccctggaccacggcggccgagacctgcctcaccccccgcgcccgcgcgcgcgcccgcggcgcgcgccccgggccgggccgg

SEQ ID NO: 220 - DNA, 5649 bp, Unknown
  source: /note="Description of Unknown: MKP2_2161_1 Mutant Bacteria sequence"
caacaccaagaaacgcttggtgggcgacaagcggccgacgccgcccgagcgactatgccgctttttgggtgagccggggtatcgccacggcgatggccgtgttttttagggaaggacgctgccggagttccggtgggggatcatagacgcgtacggccagatggttggggacggcgaacggatgacgattacgtgtaccattatctgcgtgatcctcgggacgctgtgggggttaactctcggtctcgggcggatggcgaaggccgagcacgggccgtggaaatatattctccgctacctggtgcagtttccggtgcgcttttacgtcagcgccttccgcggcacgccgctgttcgtgcagattatggtggtgcactttgcgctggtgccgctgtttatcaatccgcgcgacggcctgctggtgaccagcggcctgatgagcgccgactttgcccgcgaactgcgcgccagctacggggcgttcctctcctgcatcgtggcgatcacccttaacgccggagcctatgtgtcggagattttccgcgccggcatccagtcgatcgacaaagggcagatggaggcctcccgcgcgctgggcatgccgtggtggaaaaccatgcgcaaggtgatcctgccgcaggcgtttcgccgcattctgccgccgctgggcaataacgccatcgccattgtcaaagactcgtcgctggcctcggcgatcggcctggccgatctggcctatgccgcgcgcaccgtctccggcgcctacgccacctactgggaaccctacctgaccatctctctggtctactgggtgatcaccttcctgctggcgcagctggttaaccgtctggaaaagaggtttggcaaaagtgattcacattaataacttacataagcgcttcggcgacagccacgtgctgcgcggcatcagctgcgatattaaaccgcaggaagtggtgtgcatcatcggcccatccggctcggggaaaagcaccttcctgcgctgcatgaacgccctggagacggtcagcgaaggcgaggtggtggttaacggctttgccgcccacgaccggaccaccgacctcaacaagatgcgcgaaagcgtcggcatggtgttccagcgctttaacctgttcccgcacatgacggtgctggaaaacctgatcatggcgccgatgaatctgcgcaatatgccgcgccagcaggcggtcgacctggcggaagccttgctggcgaaggtgggcttaagcgataagcgcgacgcctggccctcgagcctgtccggcggccagcagcagcgggtagccatcgcccgcgcgctggcgatgaagccgtcgataatgctgttcgatgagcccacttcggcgctggatccggagctggtgggcgacgtgctggaggtgatgaaaaacctcgccagcgaggggatgaccatggtgatcgtgacccacgaaatgggctttgcccgcgaagtggccgaccgggtgatcttcatcgaccagggcgtgattcaggaagagggcaagccggggcagatctttagcgcgccgaccaacccacgcaccgccgcgttcctcagcaaggtgctgtaaaccgggcgggctggcgcgatgccagcccgctgagcattccgggtgtattgacgaagcttttaatcatccgcgcaaacattgactgggctcatatatcccgcgataacccctttgttaatctcagggtgtcgattaggacttctccaggaaaataacgttggaaatctttttttaacccactgaaaaatagcgattaactatttttcatacgccaaaaatcatggtccgttaatgacggactcggtttcgtatgggttaaaaaaggtacgttatgacagttacatggacggtcacgcccgtggggtatcagcacattgccaaacgctgccccgcctgcaatgtaaaacgcgacttcgcgccttccggcgccatccgggtgaattcgcaaaagaagctgctggatatctggagcatctataaatgcacgcgctgcgattacacctggaatatcgccctgttttccaggcagcacgtcagcaagataaaccgtgaactgcttcagcgcctgctgcagaacgatgcagccatggttcactattatgccgctgacctcgcgacgctgaagcgcaaccgcgccgagccgtcggggcaacctgattttcgtattcacgagcaatggtcggttacgttgatggcatgtcagcggataacggtgcgcgtcagagtcagtcagccatttcgcatcagcctgctatcaatactgaaaaaacagctcaagctgagtacggctgaaatccggtggttggtcgcgacagggcatatcgagggtatttcactaaaacagctcaagacgaaaaagctgaaggcgatggaatatgattttcagctggcggcggaaacgctgtatgcgcgacgccggattacgttatcactttgcggtagataacttgccgggaagataagccgcagcgcttgagctgctggcttttttattcctcggtgaataaggacggcgaagttggccgtcctgacacccttttctccgcctgcaaaagccacctccgctgcagccattcaatctgcagacgcatagtaaacaaacgccagcttattgccgtcgggatcgcggacgtaggcgctgtgaaaaccgtcgccatactgcggccggtgaccgggaccgccttcatcacgtccgccgagttgcagggcgagggcatgcagttccgcaatatgtgcgacggagcgggcgttaagcgccaccatcgttccattacccaccccggcaggctgttggtcaaaaggaacgcccacgcacagcccgcaggtgtgattgccgttgtaggtgccccaggacgccccctgttcgttacggccggctttgacgtgccccagcagcgccattaacgggtcatagaacttgatggcgcgtggcagatcgttcgttcccagcataatgtatgaaaacatagtgttctcctgttgcgggcaaaaaggcctaaaccttcaggctggctgaaggagatgttgctgacggagttttaacaagcgcgagaccagcatgatgacgacgattcccgctatcagcgccaggcagtgaaaagcaattctgccgccagcctggaagtaaacccagcgcgctacttccaccgaggccgccataaaactgagcgccacaatgttgatggtggctgaaaccgtccctttcggcagggagtgggaaaaaagcgcaaaacggaataatacggggaacaacaggcctgttccgagggcatagagactcgttcctgaaacggaccaccaccaggtatggggccatgcaatatttcccgccagtaataccaacaacccggtcagctgtatcgggatagtgcgccagataaagcggggagaggtcggatccttgataaaacgggccactatgatgctggcaataataacgccgccaaagacaggcacctgggtccaggcatagacgccgcgcgacatcccgccgtcatcgatcaggatcaccggagagagtgctacccaggtgattatcggcaggttactgaatgacaaggccagcgcgcccgtgagcaccaccggctgtttaaaggcgcggacaaactcggaaaatacctctcccggacgaaacccccggccctgagaggtgaccgtttctggcatgttaaaaatcagtaacgcccaggccagcaagctcatggcgccgatgatcgcaaacaataacttccagtgcaggaaattcatcaggccagcgcccgccaggggcccgattaccggcgccagcaaaacgatggatgtcagcgccgccataatgcggatagactctttttcatcaaaagcctcctggatggagacataaccgactgtcgaaatgaagcagatactggttccctggataaaacgggcgataagatattgatcaatcgacgtgacaaagatcatgctgaagcaggccaaagcaaagatgatggctccggtcagtagtacggggcggcgaccaatgcggtcggagagcggccccagcagccactgtaatgccagccccccggctaaatagaggctgacagaggccggggctaacgcaacatcagcctcaaattcccggatgatgtggataatacccggctgaatgagatcggtagtcagataagcagaaaaatcatagataaccatcgccagcggaaataacaagattctgctaaaacggatgtacggtcccaacgctaatttcatacgcgaagactccctggtcggtgacggtttccctggtatcggggcctggttgatgtggatcccttgcgactgtcgtcacaggctggccgcggaatgacaaatcgaaagataaaattcgcctgacgacggtcattgggtaaggcaacgcaacggcatgcagagggagtgatcgagcatggcagagggataacgcaccgggttaactggctgggggtgacgtttcttatgcgagggaggggtctcgctgccatcgcgtggatgtggagcgtttgtccgcaggggacgagaatgaataaagtcgcttgctcctgaggggaaacattcataccgggaaacctgtgtcatcatcatgggcaaaataggcgaacactcgccagtgtccgcattcgatttcagcgcagtgataatcagtccggccagtgatggtcggaagtctgattatcagatgattaggttttccagcatcgacgcctcagctatgggtatgaattatttatcaaggaaatgataacacccacatttattatgggaattgcgcaggtaagaaaatgtgactttcgcccgcttactgcgtgaagctgatcgcaacagacccggcgctgcgctcagccttgccatggtacaccacctcaatattattcccctgcggatccagcacaaaagcggcatagtaaccaggatgatagtgtcgttcgccaggcgcgccgttatcacgtccgccatgggtcagtgccgcatggtaaaaagcgtccaccatgtcacgatctctggcctggaatgccaggtggtggcgcccagtcagtttcccggcagcctccgggctgtggcgtgaggccaccaccagttcgtcggccagcaagtattcgttggaggtggtgataaccgggatctccagcgccgacagtacggcggtatagaagtttttgcttgcctcaaagtcttcgacaaccagcagaatatgatcgatcaatctgccacgatgtaaggtattactttccatgggatttcctctcggctggggggccggcaatggttaacagcagtgagccagcaagaacaggataccctccggtgagggccataaaaaagggctggcgccaggccagcccgtgaggactaccgtgcggactccgtcgcctcgtccatgtcatcttcctgctcactggcaagcagggttttctcgtttttgcacagacactgaatcaacaggaacagcacgccgctggccaccagggtgacgatcaggccatcgtaaccagtgatgccgatcagcatgccgctgactaccggcccggcaacgctgccggcggaccagaaaaagccgaacagggcgttaatcataatcagcttctgcccattgaaggttttccccgcccgcacc

SEQ ID NO: 221 - DNA, 4904 bp, Unknown
  source: /note="Description of Unknown: MKP2_2161_1 Mutant Bacteria sequence"
gtcccgcgcgggccatccgtcgaaggtgattttccttgccgccgatgcgtttggcgtcctgccgccggtctcccgtctgaccaccgagcagatgcagtaccatttcctgtcgggtttcacctcgaagctggcgggcaccgagcgcggcattacccagccgacgccgaccttctccgcctgctatggcgcggcgttcctgctgcttcacccgacccagtacgccagcgtcctggcggcgaagatggcggaatccggtgccgaagcctggctggtcaacaccggctggaacggcgagggcaaacgcctgtcgctgcgcgatacccgcagcatcattagcgcgatcctcaacggcactaccggcccgctgcgcgaggagaccatcccggtgttcggtcttgcgatcccgcagagcattccaggggtagacagcgcggtgctggatccgcgtaatggctggagttcagcggataaatggcaggagaaggccgagagcctggctcagctgtttatagataacttcaagcagtacagcgataccgaagcgggtgcgcgtctggcgctggccggtccgcagctgcagaagagcgcggtcgaagcctgatccgcggccagcaggtcgacgcctggcgccgacctgctggcgagccgctttactccgcaaaggcccgcagcgcatcgccagtgaggcgataacgcacccactcatcctgcggctgcgcgccaatgctcagatagaaatcaatcgccggctggttccagtcgagcacgctccactccagacgcccgcactgacgttgtacagcatattgcgcgatggttttcagcagcgcttttccggcgccgatcccgcgatagtcgggggtgacgtacagatcctccatatagataccattgcgtccaagccaggtggagtagctggtgaagaacaccgcgtagcccaccgctttgcccgccacctcgcagatcagcgcttcggttttgctgccgctggcaaacagtggctctctgatctcctctggcgtcgtcactacctcttggggggctttctcgtagaccgcgagttcataaatcatgtcgtagatagcggtggcgtcgtccggggtggcctggcggattgtgatgctcatgggttgtcctgtatccatagtcaaaagagagcaaaattgctgaccctgaggataagcggtattgtgaaaagaattaagtgcaatgaaatcagcaaacgatgaatattatgcatcctgtcctgcgccggattgacctcaacctgttgccggtctttgacgcggtctatcgctcccgctcggtacgcctggcggcggaagagctggcgatgagcacctcggcgctgagccatgcgctttcccggctgcgcagcgccctcaacgatccgctgttctaccgcgaaggccaccggatgtgccccagcgtctatgccagccagctggcgccctctatcgcttcggcgctgaagtttctcaaccaggagctgacgccgccggcggcgtttgtgccggccgccagcaccgactgcatgcagattgcgatcaccgatttcaccgcgttctgcgtctttccgacgctgatgcatcacctgcagcgtgaggcgcccgggctgcggtttgagctccgttatctgccccacagcccggcgctgaccgagctgctggcgggcgaggtcgacctggccctcgggttcaatacccctgacgagccagcccatcccgatcttgaggagattaactggctgcgggacgaatatgtggtcatcagccaggccaaccggacggcgctgaccctggacgcctaccttgcggcccgtcatctggtggtgaccccgtggaatgagcggcagggggtgctggactgtgagctggagcgacagggctattcgcggcaggtggcgatgaaaaccccctcgatgctgagcgcgccctttattattgagcagagcgacctgttgatggcgctgccccggcgggcggcggagacgatggcccgcgccgcccggctgaccattttcccgctgccgtttccggttccgccgtttgacgtcaagatttacgcccaccaacgcagcgggaaacgcgaggctacccgctggcttatctccctgttgcagacgctggtgggggagtccaccgcttcctgacgcgctttccagccggcagggtatttcgttaccccaggccaggttttatgccttcaacccacggcgacatatcctggccccggtcacaaaacggaaaactgactttttcgccgtcacccgcggcgtggttaggacggtgtgtgttaaatgattgtatgtaaaagtaatgttaattagttaaatgttattcatgcgtaaaatgcattagtggatgcgtttattacgcttatttcgttcccggttctgtttcagtcttcagcgacaggcgcgcgacaacgcgtggataacaaactggagacctgcatgcattcaacaacctcacagatgagtacccgtgaccggatcggcgccattctgcgcgtcacgtccggtaactttctcgaacagttcgacttttttctgttcgggttttatgccacctacatcgcccataccttttttccggcgagcagtgaattcgcctcgctgatgatgaccttcgcggtctttggcgccggctttttgatgcgccccatcggcgctatcgtacttggcgcctatatcgacaaggtggggcggcgcaaggggctgatcgtcaccctgtcgatcatggccaccggcaccttcctgatcgtgctgatcccctcttatcagaccattggcctgtgggcgccgctgctggtgctgatcggccgtctgctgcagggcttttccgccggcgccgagctgggcggggtgtcggtctatctggccgagatcgccacctcgggccgcaaaggcttttacaccagctggcagtcgggcagtcagcagattgccatcatggtggcagccgcgatgggctttgccctcaacgcggtactggagccgagcgctatcagcgactggggctggcgtattccgttccttttcggctgcctgattgttccgttcatttttatcctgcgccgtaagctggaggagacccaggagtttactgcccgccgccatcatctggcgatgcgccaggtattcgccaccctgctggcgaactggcaggtggttatcgccgggatgatgatggtggcgatgaccaccaccgcgttctacctgatcaccgtctatgccccgacctttggtaaaaaggtgctgatgctcagcgcctctgacagcctgctggtcacgctgctggtggcgatttccaacttcttctggctgccggtgggcggggcgctgtccgaccgctttggccgccggtcggtgctgatcgccatgaccctgctggcgctggctaccgcctggcctgcgctgaccatgctggcgaacgccccgagctttttgatgatgctgagcgtgctgctgtggctgtcgtttatctacggcatgtacaacggggcgatgatcccggcgctgaccgaaattatgcccgccgaagtgcgcgtggcaggtttctcgctggcctacagcctggcgaccgcggtgtttggcggcttcacgccggtgatttccacagcgctgattgagtataccggtgataaagcgtctcccggctactggatgagctttgccgccatctgcggcctgctggccacttgctacctctatcgccgtagcgccgttgcgctgcagacggcacgttaatcagggagaagatgatgcgtaaaacgacaggaaccctgctggccacgctgctgctggccgccaccggcggcagcgcgttgtccgctgaggtcaccgtgatgatctccggcggcttcaaagcggcgctggaaaagctggccccggcgtgggaaaaacaaaccggcaaccacctcgtggtgatccctggcccgtcgatgggaaaaacgccgcaggcgatccctaaccgtctggcgcgcggcgaacacgcggacgtggtgatcatggtcggggacgcgctgaccagcctcgagaaagcgggccgtacgcaaccggattcgcgccgggagctggccgactcgccgatcggcgtggtggtgaaggcgggggcgccgctgccggctatccacagcgcagaccagctgcgggcgacgctgctggcggcgccatcggtcgcgtactccgacagcgccagcggacgctatgtcagctcgacgctgttccacaccctgggcattgatgacgcgatgcagagtaaagcgcagatggtggagcgcattccggtggcctcggaagtggccaagggacggtatgcgatcggttttcagcaggtgagcgaactgctgccggtgcccggcgtaaccttcgtcggcgaactgccggataacctgcagtacatcacccgctttgccggggcggtgaccatcagcgccgaccacccgcaggaaggcaaggcgctgctgacgtatctggcgtcaccggcggcgcaggagaccatccacgccaccggtatgcgaagcgtggccgccgccgcgccggtcagccagaaggatactgttcaataatcagcttctccagctctgccgccacgtaggactgaatacggccgctgaggcggatcaggcctaccgtacgcgtgaccaccgggtcggtgagcggcacagcgcggagaacggaatgctccccggcgggcatcgacatcgcgggcacggcggcaatgccgatgccagcttccaccatcccccgcaacgtggtgacgtggcgagtatcgccgatacttggccgggccggcgacagttgcgcccgcccccgggccagcagcatgcgggccctgatccacctctccgagacccccagacaaaaagggaacgaggaggacggacgggcggtgaggaaa

SEQ ID NO: 222 - DNA, 4632 bp, Unknown; identical to SEQ ID NO: 91
  source: /note="Description of Unknown: MKP2_2161_1 Mutant Bacteria sequence"

SEQ ID NO: 223 - DNA, 4410 bp, Unknown
  source: /note="Description of Unknown: MKP2_2161_1 Mutant Bacteria sequence"
tacgttcttctgatgttgcgcagtgtagtgctatcgttgagcgttggctgctgttgtgtcgtaagacgtagatggcagacgtgtggtagatcggtgtcgtgagcgcggtggcgtggatacgagaaagttacatgagactgattgatacatgtagaggcgcaaacgagtgacttgttttttttcaagcagaagacggcatacgagatcctctctggtctcgtgggctcggagatgtgtatgagggacagccgcagaacggccagctcgctgcgttcatggccggccagctcctggacggtcacctgctcggcgcgccagcggcgcgggcgggcgctctcctggccgtcatcaagattgccgccgctggcgctgagcagcggcagagcgagcagaacctccacgctgtcctgcatcacgtccgatacatcgcggaccggtggcaaaatatccgccagctcggtgtcaatcagcgttccgtcggcgaaacgcacgatcagccgggtagcgttgagccgggaaagggtgagcgcgctcacgtcaaactccgcgcgcaataccccccacgggtgggcgagcgccatgcgggagaccgtatcggcgccgtgcgcgtcccagcgggcctgttgctgaaactgctgcgggaccagaaaagccccgtcgcgccataatgggcggaaaatcttcattgcacctcctgtgcctttcactttcattggtctgcagacaggaccaaatgcccggacggatatccctcatccgccgtgtgttcggctggatttattacctgccgcttcagggaaaggaaatatctcccctgcccgcgagagtttcgaagtcagatgatattttttggtcaagggatgtttatcataaagcgaaagagtcagggggaggtaacgcctggccctaaataatatctgaattcaacccaaggtagctttattgctctcggtcatcacatgtagaaggaatattccataagcgacccttttattattttcctgttgaatattaattagcgaattaatccctccgtcaggaatatttatatttaccttaaatataaataataataaaaatatcaccgcaatcgatataccctcagtagcgctgagtccagaatctcccccggcaactgccagatacccggaggagtgccccgcccccacccggccattgccaggcgctgcattaccccgtattttggtttcccgctccgctgtgggcgggtatcagggcgaacgagagagagaaaatgaaaccactatttgtctatgggacgctctgtcccggtcgcagcaatgcgcatattctggaggcgatcgggggcgagtggcgtcccggctacgtcaccggcaccttttacgcgcgcggctggggcgcagccgccgatttcccggggatcgtcctcgacgctcacggcccacgggtcaacggctatctgttcctgtccgatcggctggcggcgcactggcccatgctggacgactttgaggaagggtacgatcgggtgccggtggaagtgaccaccgacgatggacagcagatcagcgcctggatttatcagcttcagccccgggggtaatcccccgccgcgctgcgcggcatggtacagcagcccagcgcgatcgcgagtctggcgtcgtttctgccaatgcaggtatacttgccagatgtttcctcagtttcagacacgcagatgacaaaactcaccttacaagagcagatgctcaaagccggcctggtcagcagcaaaaaaatggctaaagtccagagaacggcgaaaaaatcccgcgttcacgcccgtgaggcccgggaagcggtggaagaaaataaaaaagcccagctggagcgggataaacagcttagcgagcagcaaaagcaggcggtgctggcgaaagagtataaagcccaggtgaagcagctgatcgagatgaaccgcattacggtcgcccggggcgatatcggctttaactttaccgataataatctgatcaaaaaaatcatggtcgacaagcccacccagacccagctgattaacggccgtctggcgattgcccgcctggcggtggataacaagcccgaaggtgaatatgcgattattccggcggtagtggctgagaaaattgcccagcgcgacgccagcagcatcgtgttgcacagcgccctgagtcaggatgagcaggatgaagacgatccgtacgccgactttaaggtgcccgacgatctgatgtggtaaccccgggctttcccgccgcgggcgatcaaaacgggctcgcctgctggatatgcatcggctcatggctgacggggtggacaaaacgcagttcgctggcgtgcagcatcagccgcggagcgcattccgtgccgggcagctcccggccaccgtacagatcgcagccaaggatcggatagcccagcagctggcagtgaatacgcagctgatgggtccgtccggtctccggggtgagcgtcacccgggttaacgccagcgccctctcgccttctcgcgcctgatacaggcggtctatgacccgatagcgcgaacgcgccggtttgccgtggcgggcgcagagcgccatgcgcgggaaacgggccggatctttggcgattgccgcctccactatcccctcgtcttccgccaggtggccgctcagcagcgccgtatagaccttgtccaccgtgcgctggctgaactgttggcacagcaaggcgttaatgcccttgttgcgggcgatcaccatcaggccggaggtgccgaagtccaggcggtgcaccagggtgcagcccggaaagcgctgaaccagccggtgatgcacggagtcgaggttgcgcggatctttgcccgacaggctcagcagcccggcgggcttattgatcagcaccaggtgttcgtcctgatacaagagggtgatctgttcgcggcacggcggcgcgacaaaggtatcgataatggtggacatcaggcggcccgaagaaggagtggctggcgatagtaccccattttgcccagcggcacgatgctggcgcacaatccgccctcgcggcggcgtcatttatcacccacacttatcgcaaaggcatggcctgtacaggcaatgtgctttacactgcgcgctgcaaaatttgtgttaaccaacgagtaatacggtaatggcgatgaacggaacaatcacaacgtggtttaaagataaaggttttggatttatcaaagatgaaaacggcgaaaatcgttattttcacgtgattaaggtcgccaatcctgatcttatcaagaaagacgcggcggtgactttcgaacctaccaccaacaataaagggctgtcggcctacgcggtgaaggtcattccggaaagcaaatatatctatattgccggcgagcggttgaagctgacctccatcaaatcctatgtggtgtaccgggaagaagagccggtcgagacccgcgtcgataaagaaaacgccgtgctgtcggtcgggctgctgatgaacagcatccggccaaaagccacggtgcagccgggagagatgcgctcggtgaaaaagctggcgatcaccacctttcaggggacaaccctgatcttttcggaagacgaaatcgatatcgatgccacggtaaaactgcttaaggtgtaagccctggcgcgcggtttcccgcacgcccgaagtcctgcccgatatgctacccgccatcgcccctcgccggacggggcgatggcgccagagagccgataaggatgccgccatgcccgtaaattttgacttcaacgatctctacgcctttcgcgccctgatggaatatggcagttttcggctggcggccgaatccatctgcctgtcgcagtcggcccttagccgacgcatcgaaaagctggagacggcgctgggcaaccggctgttcgatcgcaccacccggcgggtgaccctcacgctgtatgggcaaaattttgccgaacgttcggagcagctgctggcccatgtcgagacggtgctggcggatatcagccaggtcagcaaggcgcgcaccgggctggtgacggtggcgacggtgccttccgccgcctactactttatgccggaaatcatccgcagctttcaggcgcgttatccccaggtgcgcatccggttgattgacagcagcgtcgggaatgtgatcgaggcggtcagcagcggacaggctgactttggcctctgctttgccaaaaacctgccagccagtatcgaattcacccctcttgccgacgaccgctatgtggccgcctgtcggcacgatcatccgctggcgcgcaagacgcacctaagctggcaggcgtattttgaacaggattatattggcctggatcgggtctccggcaaccggacgctgcttgaccgggagctggcgcatctgacgccggcgcggccaagtat

SEQ ID NO: 224 - DNA, 4160 bp, Unknown
  source: /note="Description of Unknown: MKP2_2161_1 Mutant Bacteria sequence"
ctcaataccctcaataagcgggtgctgatcctcggctcgggcggactctcgcaccagccgccggtgccggagctggcgaaggccgacgctcatctgcgcgatcgcctgctcggcgacggaaaacagctgccgccggacgaacgcgaacggcgccagcagcgggtgatcaatgccgcccgacggtttaccgaagacccgcactcgctccatcccctcaatccggtctgggacaaccgctttatgagcctgctggagcaggggcggctgagcgaactggacgcgatcggcaatgacgagctgtcggcgatggccggcaaatcgacgcacgaaattaagacctgggtggccgcttttgccgcgctatccgcttttggccgctggcgcagtgaaggccgctattaccggccgatccccgagtggatcgccggattcggctcgctgagcgccaccaccgagatttgattgaccgggagactaacatgagctatcaaccgcaaactgaagccgccaccagccgattcctcaatgtcgacgaggggggccgcacgctgcgtatccatatcaatgactgcggcgacgggaaagagaccgtggtcatgctgcacggctccgggccgggggccaccggctgggccaacttcagccgcaatattgacccgctggtcgaggcgggctatcgcgtgctgctcctcgactgtccggggtggggcaaaagcgatgctatcgtcaacagcggctcgcgttcggatctcaacgcccgcattctgaaaagcgtggtcgatcagctggggatcgataaagtccatctgctgggcaactcgatgggcggccatagcgcggtggccttcaccttgagctggccggagcgggtggctaagctggtgctgatgggcggggggaccggcggcatgagcctgttcacgccgatgccgaccgagggcatcaagctgctgaacgccctgtaccgcgagccgaccattgaaaacctcaaaaagatgatgagcatcttcgtcttcgacacccgcgacctcaccgaggcgctgttcgaggcgcgtctcaacaatatgctgtcacgccgcgaccatctggacaacttcgtcaagagcctggaagccaacccgaagcagtttcctgactttggcccgcggctgggcgaaatcagcgcgccaactctgatcgtctggggacgcaatgaccgcttcgtgccgatggacgccgggttgcgcctgctcgccgggatcgccggttcggaactgcatatttaccgcgactgcggccactgggcgcagtgggaacatgccgacagttttaatcagctggtgctcaatttcctcgcacgggcttaaggagtaaatgatgactttttctcttgacgcgctggcccggcagctgcgcgacgcggaacagagcggccaggcgatcgccccgctgcgcgatattctcggcgtcgacaatgccgacgccgcctatgccatccagcgtctgaacgtccagcaccacgtggcccatggccggcgggtggtgggccgcaaagtgggcctgacccatcccaaagtgcagcagcagctgggcgtcaatcagccggacttcggcaccctgtttgccgacatgtgctacggcgacaacgccggggtgccgtttggccgcgtgctgcagccgaaggtggaggccgagatcgccctggtgctgaagcaggatctgccgcatgccgataccacttttgatgaactgtataacgccatcgaatgggtattgccggcgctggaggtggtgggcagccggattcgcgactggtcaatcggctttgtcgacaccgtcgccgataacgcctcctgcggcctgtacgtcattggcggcccggcgcagcgtccggcgggactggatctgaagcagtgcgccatgcacatgacccgcaaccaggagctggtctccagcggccgcggcagcgagtgtttggggcatccgctgaacgccgcagtctggctggcgcgcaagctggcgagtctcggcgaaccgctgcgggccggggatatcgtgctgaccggggcgttaggcccgatggtgacgattaacgagggggacagctttgtcgcccatatcgaaggtattggctcagtcgcggcacgcttcgttgccgccggagaaggagatcgtgatgcgtaaacgtaaagtcgccattatcggctccgggaatatcggcaccgatttaatgattaaaatcctgcgccacggccagcatctggagatggcggtgatggtcggcatcgacccgcagtcggatggcctggcccgcgcccggcgcctgggcgttgcgaccactcacgaaggggtgggcggcctgatgcagatggcggaatttgccgacatcgattttgtttttgacgccaccagcgccggggcgcacatcaaaaacgatgccgcgctgcgcgaagcgaagccggggatccgcgttatcgacctgacgccggcggcgattggcccgtactgcgtaccggtggtcaacctcgcggacaatctccatcagggcaacgtcaatatggtgacctgcggcgggcaagcgaccatcccgatgatcgccgcggtctcgcgagtggcgaaggtgcattacgcggagattgtggcctcgatcgccagccaatccgccgggccgggcacgcgggccaatattgacgaattcaccgaaaccacctcgcaggcgattgaaaaagtcggtggggcgggcaagggcaaagcgattattgtactgaaccctgcggagccgccgctgatgatgcgcgataccgtctacatcctgagcgagctggcgtcgcaggaggcgattgccgcctcgatcgccgaaatggcggcagcggtgcaggcttacgtcccgggctaccggctgaagcagcaggttcagtttgaggttatccccgaggacaggccggtcaacctgcccggcgtcggctgtttttccggcctgaaaaccgcggtgtacctcgaagtggaaggggcggcgcactatctgccagcgtacgcgggcaacctcgatattatgacctcggcggcgctggcgacggcggagcaaatggccggggcaatgcacagcgcggcgggagcgacagcatgaacggtaaaaaactttatatctcggacgtgacgctgcgcgatggtatgcacgccattcgtcaccagtattccctggcgcaggtgcagcagatcgccagcgcgctggataaggccggggtcgactccatcgaagtggcccatggcgatggcctgcagggatccagcttcaactatggctttggcgcccacagcgacatcgcctggattgaagcggcagcggatgtcgtgagccaggcgaaaatcgccaccttactgctgccgggcatcggcacgctgcacgatctgaaagcagcgtatcaggccggggcgcgggtggtgcgggtcgccacccactgcagcgaagcggacgtcgccgcgcagcatattgcctttgcccgcgagctggggatggacaccgtcggttttctgatgatgagccatatgatctccccgcaggcgctggcgcagcaggcgctgaagatggaatcttatggcgcgacctgtatctatgtggtggattccggcggggcgatgaacatgaacgacattcgcgaccgcttccgcgccctgaaggcggtgctgaagccggagaccgccaccgggatgcatgcccatcataatctgagcctcggggtggcgaactcgatcgtcgcggtggaagaggggtgcgatcgcattgacgccagcctggccgggatgggggcgggggcgggcaatgcgccgctggaggtgtttattgccgccgccgacaagctcggctggcagcatggcaccgatctctacgccctgatgaacgcggccgatgagctggtgcggccgctgcaggatcgcccggtgcgtgtcgaccgcgaaacgctggcgctgggctacgccggagtctactccagcttcctgcgccacagcgaagcggcggccaagcgctatggcctcagcgcggtggatattctcgtcgagctgggcaagcggcggatggtcggcggccaggaggatatgctggcgcttatacaaatccgacggtgcgggcgagcgaccacggggacgatgggggggggggagggctgctagacaggagccga

SEQ ID NO: 225 - DNA, 3804 bp, Unknown
  source: /note="Description of Unknown: MKP2_2161_1 Mutant Bacteria sequence"
taatgagccggtcccaccagccctcatagtagccagccagcagcccaagcaccgtgccgatggccgcgccaatcagcaccgccagtaccccggcggccagcgagatctgcgccccgaccagcacccggctgaaaatatcccgtcccagggagtcgactccaaaccagtgcaccagcgaaggtccctcgttcagacggtcgtagtcgaaataattttccgcatcgtacggcgctatccatggggcaacgatggctaccgcaatcagcaacagcacgaaaataccagcgcccatcgccaccggctggcgacgaaagcgccgccagaactcatgccagggggtatggatctcgccgggtctgatgcccggcatggcgttcagcgccgcctgccttctccagttaagcaatcgcaccttacttatacctgatagccgggtttatggccgcgtacagcacatccaccactaaattgataagaataaactccagcgaaaagagcagcacttccgcctgaatcactgggtaatcgcgcatctccaccgaatcgaccagcaagcgcccaagccccggccagttaaacaccttctccacaacgatcgacccgccgagcagaaagccgaactgcagccccatcatggtcaccaccgggatcatcgcattgcgcagaccatgcttgagcaccacccgcgtttcgctcacccccttcgcccgggcggtacgcatatagtcttcatgcagcacatcgacgaatgacgcgcgggtaaagcgcgccatgaccgccgccaccgccgcgccaagggtcaacgacggcaaaatatagtgccgccagctgtcggcccccaccgtcggcagccagcccagctcaaccgaaaacacctgcatcagcagcataccaagggcaaaagccggaaacgaaataccgctcaccgccagcgccattcccagacggtcgggccagcgattgcgccacaccgcggccgcaatccccgccgccatcccgaacagtaccgcccagctcatgctggccagcgtcagccacagcgtgggcataaagcgactggcaatctcactggcaacgggacgccgcgaggccatggaaatgccaaaatcgccgcgcagcacgttggtgatatagtgccagaactggacatgcagcggctggtcaagccccagctgctggcgcaccatcgccaccacctgggcatcggcctcaggtccggcaatcagccgcgccgggtcaccgggcagcatatggacgaacagaaacaccagcaccgcgacgataagcagagtggggatcaggcccagcaggcgcttaatcacataattcagcatcgctccctcccattccgggagagaggacgcatgaagatgaacatgatcacggcgtcaggtccgcctgttcgaagctaaagccggtatccggctggatatagaaaccggtgaggttcttgctgtgggcggagaccagtttctcgaccaccagcggcacccacggcgactctttccagataatatcctgcgcctctttatagagtttggttttctcttgcggatcggtggttttcagcgcctcgctcagcgcgttatccacctgcgggttgctgtaaaacgcggtattaaacagcgtcggcggccagttttgcgaggcgaacagcggcgacagcgcccagtcggcttcaccggtggaggcggaccagccggtatagaacatccgtaccccgctctctttctgccctttaccttccacttccgccgcccgctgaccagcgtccatcgccgtcacctgcgccttaatccccacctgcgccagctgctgctgggtgaactgcagtactttctgcgcggtgctgtgattatgtgatgaccacagcgtggtgctgaaaccgttagggtagcccgcctctttcagcagctggcgcgctttcgccggatcgtatggccaggcggtgtaggtctgggcataggcgatcgacggcggcaccactccggtcgccgggggggcgtagccggcgaacgctaccttcaccagcgcctgacggttaatcgcatagttgatggcttcccgtaccttcggattatcgaacggcttctgcgtcacgttcatgctgatgtagcgctgcatgatcgacgggctggccaccagctccagtttgctgtttttcgccagcagcggcgcctgttcgtaagggatcgggaaggcgaactgcgcctcgccggtctgcagcatcgccgcccgggtattgttatccaccaccggacgccaggtgatagaatccagctttggcagccccggctgccagtacccatcgaacttgctgaccttcacaaaatccgtctggttccaggtgtcgagcttatacggcccggtgcccaccgggtggaagccgatatccttaccatattttttcagcgccgccggcgaaatcatcgctgtcgccggatgggcgagaatgttaataaacgccgagaagggctgcttcagggtaattttgaccgtagtcggatcgaccgcctcggtgctggcgatatttttatacaggttatagcgcttgagatggttatccgggttactcgcgcgatcgaggttagcctttaccgcctcggcgttaaagtcagtgccatcctggaatttcaccccgctgtgcagcttaacggtgtacaccaggccgtccggtgacacggtatagctctcagcaagaacgttttgcagcttcatctctttatcaaggccgaacaggccttgataaaaggacttcgccaccgcctgcgacagggtatcgttggcatcataggggtcgagggtcgtgaagttagacccgaccgccaccaccacatctttggcggcaaaggcgggagcgctcgccagggctgccgcgatactcagcgccagccaccatttgcgtgaaacaggttgtgtcatcgtgttctcctgaaaagatgcgttatgtgttgttatgttctgcccagcacatcggcggattcgcgggcgacgaagtggcccggcccgacctgctgcaacggcacgctggcgatctcctcgccccgcttataaatattgcccgggacgtcatcagacagcaggacccgctgcggatgacggtggcccgggtcggccaccggtacggcggccatgagcttacgggtataggggtgctgcgggttttcaaacaccgcgcggcgcgggcctatttcgacaatgcgaccgcgatacatcaccgccacgcggtggctgatgcgctccaccaccgccatatcatgggaaataaacagaaacgcgatgcccatctcgcgctgcaggtcgagcatcagattgataatctgcgcccgaatggagacatccagagccgacaccgactcgtcggctatcaccaccttcggattcagcgccagcgcgcgggcaatgcagatccgctgccgctggccgccggaaaaggcatggggatagcgccaggcatgctccggctgcaaccccacgcgcttcagcagccaggcgacccgctcacgcgctgcttccccacgcagcaggccatgcacccgcagcggctccataatcgaatcgccgaccgtctgacgcggatcaagcgaggcgtaaggatcctgaaaaataaactgaatattgcgccgcagagcctgcagcttgccgccggcgagggtatcgatccgctgaccgtcgaaggtaatggtgcctccctgggtctctaccagcctcagcagcgcccggccggtagtcgacttgccgcagccggactcgcccaccagcgacagggtctctcccggccagagatcaaaactgaccttctcc

SEQ ID NO: 226 - DNA, 3711 bp, Unknown
  source: /note="Description of Unknown: MKP2_2161_1 Mutant Bacteria sequence"
tactggctttataatgaccgttttccgccgctatccggtacagacgggcaatctccgcatccaccgttttatcccggttaatcagattatttttttgccgccagcgggcgtatttaaacaggacatcagtatcagcagacgcctcaggaataatctggtgtttacaggtaaacgccaggcgggtatgaatatcggtcagcgggttcatcggcgcgtccttgtgggtattgttctggtcacaggcggtcagtaccatgcagaataaaagtaagagtcgtttcatcaatccagatcgctcagcgttgatttgttgtaaaaaaatttaatcagcgatgctacgggtttgttctttttagtgccttgtaaatctttattttctttcagaatataaccccattcctcaaatgccttcgctggatcatcctgcccccctcgtccgttagtatgcatattccataaccgccgtcgtaaatcccgcgtcacgctggcccattcatgggcaatattcatttcactgtccacccgcatactgcgcgtgttgatattcgctgaaccgtgggtggtaaatacatcattcacaatcatcagcttcgagtgaatatataccggcacccattcctccggtggtgagtccggagccaccagcgagcagatatgaaccttcagtccggggcgttcctccggcaggatttcactgctctgaatttcatcggccttctttttaaaatcagcaagtttctcactcatctcgcgattacgtttattgatatctccggggtcgatataaccaacagaaccaccgaacgttgcgttgctgagttgtccgatcttacgcagtttagtcacttcagggataatgtttgctcgacccagcacctcaagcatccgctgggtattcaccgtacccgccccaatgccttcatcggttacgttagtcacaacaaacaaatgcagttcgcgtcccactttactctgtctttccgcaacctgattaattaactctgccagcggcggccagcgaaaatactgattttcgatatagataaactgcgtcgcattatttacggcctgcagataaagcgtttcaatatcatgctttcctgcctgcgcctgagtgcgcaacagttgcgccatcaccggcgtaccgtgtagcgcacgcagtttcagctttttcgcgatggacacgctatcacgaatagtcagcagatcctgaccggtttccttctcccacgccatggcaaaattatgatgcagatgctccagaatcgggccggttacccgactggagatatcctgccgcggcagcttaccgttagcgcctaagcggggatccatattattgcccgggcgaaacagtgcagaatgtttatccgtatcccagtactcatcaagcatgttgtgacccataacaaaaccaaccgcagactccggcagttcgtagtcaaccagcaccgttttttgatgatgggtcacggtacctgcaagagtaagcatcgtgtcagggctgatatccggatcaagcgccatattcgcagcgcgataggcaatttcagctctctccaggaaattaaacccgcgcccgacaaacaaaggagaaagtgagcttaatttctcttgtcgttgcgctatgggtgcggcagcaatttccgctatcccggcctgtcccttttttaactgatgatcggaccattcccctgacagagaatactgactgaaccattgtcggtcataggcataacgttcatccgtagtactctggcctttccggtccttataacgaatgactcccttacccggtaaattggcctctcctcccacacctgcggcattacagggcatttcccagcccagaatacgcacctggactttttttgtttccgcaatcttgcaaagtaattcgccgatacacagcgactgaccatcacggataaagtacatcgaaggctgaaatccccagcaaataatatccaccgttttctgtgcattcatgatggcatgataaacggcagcaaacgcttcttccccgtttaccagcggcttataggtcgccggcatcggtgagtattctgtattctgcacaaaccagggagaggtgatcatacattgacgggtgtcaaccgtggcaatcggggtaataatgtcttcctgagtcattatattttatccttttaagtgagacttttgccattcagcgaggaaattaccgtcgtggcagtctccttatttttatctttccgttataagttttggtttcagcgtctttattgcaggactttctttctgtttgtgatggttcagggaccgggcaggaaaaaacgctttttactggccagctgacctgttgtatttcccggagtccggtgacgtcggcagcggcctgcccgtcgccgggttcagttgtttcgctttcgcaagtttctctatcagcgctgcgctgggcttcggcggcggcacattggcctcgcgctcttccagccatttcagtttgccgtcccactcagggagcagcgcgggtggtagcgggacgatatcattgatttccgggaccgtggggctggcgtaggaataattgctcaggatcttcgctatctgtttatagcgcctggcacgttccggatccttctgctgagccagataatagagcctgtctccaggttcaggaccactaaatccatttgctaaaaacctcgctgaactcccgttacccgcagcgactcccaactggaaggcttctattgcactctgataatcctctttaccttgtaaattaatacccagcattgccgccgccttcccctctccctgctccgcggcgcaacgacgcatctggtgcgcaatattgggcgccctgtccaccggcgccagcttatcccccacatatgcctgcgcctgcggattgccctcatccgccgccttacggtaatatcgcagggcaagcgccggatcctgctgcagccccgcgacgccccgttccagatagatagcggtcagatagtacccggtcgccaccccggcagcgataagctgctggctcagccggaactgctcatggctgctcagcgaaaactgccagcgcagggcgccgttctgcagattaatgctggccttatagtgcccgttctctgccgctatccggtacagccgttcggtttgcgcatcgacgctcttgtcctgcttcagcaggttatttttctgcagccagcgggcgtatttaaacagaacatcggtatccgcggagggcgcgggaagtgtctcatgctgacaggtaaacgccggagaggaacttatatcgctcagcgggtctgtatctgaagatgcctccatgtggacactcttctgatcacagcctgacagcagcaggctgcccagcactatccatgtcgttatccctttcattccctgacgctctccttttcctcatcatctgcagagcttatgcctcgctgacccggcgccacaccgtctcctgcgcctccacgaccagtctgtcacgcagcggccagggacgtggccgaacgaaggtcaccttctccaccggcatgatgtccccctcgcggaagtaacggatggcatgttcgctcatcccttcacggggccgccacgccggctgccagtagccgctttgcgggcagggctcaccgctgcggcactgcagccgcgccacgctgtccttctcaaagtccggtgacgtcggcagcggcctgcccgtcg

SEQ ID NO: 227 - DNA, 3662 bp, Unknown
  source: /note="Description of Unknown: MKP2_2161_1 Mutant Bacteria sequence"
ggcgggtgcgcggtcgtctcggtccgtcgggccgccgtcgggcggcccgcgccggcgtgctgtcgctgcgggggttcttggtcgaccgtcactttgccgcgtcgctgccgtggatcggcgcctttggcgaatgttgcgaacttgacggcccgtcctgggggctgctgcctccctgcctgagtcacggcgacgtgctggcggatcgcctgtgcggcgcccccggccagggctttgtctggcaggatgccgggacccgcctgaaggtcaccggcattgaactctttagcgctggcgagcagcaggccggcgaacaggatgacatttataccagctgggaccccatcgaccgccactatcgtcgcctgctgctgcgcgatggccgcctgcgcggcgtgctgctgatgggcgactgcaccgccgccgccgcgcttaccgcgcgcctggaaagcgatgagcctgccaccgtggactggctttttgacccctcttcaacgcagccgcaggctgcaggaataatgacgatgacgaaacctgtattagtgctggtgggacatggcatggtcggccaccattttctcgaacaatgcgtgagccgcaatctgcatcagcaatatcgaatcgtggtgtttggcgaagagcgttatcccgcctacgaccgggtacatctctccgagtattttgccggacgcagcgccgagtcgctgtcgctggcggccggggatttctttattgaacatggtattgaactccgcctcggcgaggcggtggcgaccatcgaccgcgacgcacggctggtacgggacgccgaggggcatgaaatccactgggataaactggtgctggcgaccggctcgtatccctttgttccgccaatccccggtaacgatctcgcggggtgctttgtctaccgcactcttgacgatctcgaccgtatcgccgcccatgccgccgcggcgaagagcggggtggttatcggcggcgggctgctcgggctggaggcggccaacgccctgaaacagctggggctggagacgcaggtggtggagtttgccccgaacctgatggccgtccagctggataacggcggggcggcgatgctccgggagaagattgtcgccctcggcgtgggggtgcataccagcaaagcgaccaccgccatcgtgcgcgaggccgacggcctgcggctgaactttgccgacggcggcgcgttgcggaccgacatggtggtcttctcggcggggatccgcccgcaggacgcgctggcccgcggctgcgcgctgcaggtgggcgaacgcgggggaattcacatcgacggccagtgccgcacctctgacccggacgtgctggcgataggcgaatgcgccctgtgggacaataaaatttacggtctggtggcgccgggctatcagatggcgcgcatcgccgcggccactctcgcaggagaggacgcctgctttagcggcgccgacatgagcaccaaactgaagctgctgggggtcgacgtggcctcgtttggcgatgcgcaggggcgcacgccgggctgtcagagctatcaatggaccgacggtccgcagcagatttacaaaaaaatcgtcgtcagtcaggacggcaaagccctgcttggcggcgtgctggtgggggatgccagcgactatgccacgctgctgcagatgatgctgaacggcatggcgctgccgccgcgtccggagagtctgatcctgcccgcgctggagggagccgcgccgaaggcgctcggcgtcgcggcgctgccggacagcgcgccgatctgctcctgccataacgtcagcaaaggcgatatctgccaggcggtgaacaatggggcgggggatatgtcggcgataaaaagctgcaccagagcggctaccggctgcggcggctgcagcgcgctggtgaaacaggtgatggagtatcagctggcggagcagggcgtcgaagtgaaaaaagacgtctgcgaacatttcccgtggtcgcgccaggagatctaccacctggtgcgggttaaccatatccataccttcgagcagttgattagccgctacggccaggggcacggctgcgatgtctgcaaaccgctggtggcctcggtgctggcctcctgctggaacgagtacctgctgaagccggcgcacctgccgctgcaggataccaacgaccgctatttcgccaatatccagaaggacgggagctattcggtggtgccgcggatggcggcaggggaagtgacgccggacggactgatcgccatcgggcagatcgccaaacgttaccagctctacagcaaagtgaccggcggccagcgcatcgacctgtttggcgcgcggctggaacagctgccggctatctggcgcgagctggccgacgccgggtttgaaaccggccacgcctacggcaagtcgctgcgcacggtgaaatcctgcgtcggctcaacctggtgtcgctacggcgtgcaggactccaccgggcttgcggtacggctcgagcatcgctataaagggctacgcgccccgcacaaaatcaagatggcggtctccggctgcacccgcgaatgcgctgaagcccaggggaaagatatcggggtgattgccaccgacaaaggctggaatctgtacgtctgcggcaacggcgggatgaaaccgcgtcacgccgacctgtttgccagcgatctcgacgaagcgacgctgatccgcagcatcgatcgtctgctgatgttctatatccgtaccgccgatcgcctgcagcgaaccagcacctggatggataacctggagggcggcgtcgcctatctgcggcaggtggtgctggaggatagtcttggcattggcgaggagctggagcaggagatggcccggatcgtcgacagctaccagtgcgagtggcagaccaccctcaacgatccgcagcgtctggcgctgttccgctccttcgttaatagcgaccagcccgacgaggctgtgcagcgccgcgatctgcgcggtcagccgcagccgctgctgactgagacgttgcccgaaggcgaactcccatcccgaccgtggcaggcggtatgcgaccttgacgccattccggcgcaggcggggatcggcgcccgcttaggggagcggcagattgccctgttccgcttcggcgagcgggtctacgccctcgacaaccgcgagccgggcagcgcggccaacgtgctgtcgcgtgggctgttaggggacgtcggcggcgagccggtggtgatctccccgctgtacaaacagcggatacgcctgcgcgacggctggccgtgcgacggcagtgaacaggcggtacgcgcctggccggtgaaagtggaaaacggcaaagtgtgggtgggcaaccagcagctgctggcccgcgcggaggcctcctgatgaagaccatccgaacgacctgcccctactgcggcgtaggctgcggggtgctggcgagcgtggacgacgcggggcaggtgagcgtgcgcggcgacgatcagcacccggcgaacctcggccgtctggtggggctggagaaaaacaggaccagtacgctgacgcagtgaaagccctctctgatacggcactcacgcgactggttctggttgcccgcgcacaggcgtcgaccctgaaagaggtctcccatacccacgaggagctgtcggc

SEQ ID NO: 228 - DNA, 3262 bp, Unknown
  source: /note="Description of Unknown: MKP2_2161_1 Mutant Bacteria sequence"
tttcaccctccgccgccggagggggcagcagttcgctcagccagcgcacaaaggtgcgcgccgctgccgcgccgcgggaaaaaccatagacatacagcttgatgcctgtcagtttcggcttgcccggttcaggctgaatcagcatcggcatcagtttcggggcaagaccattcagcaagcgagtgaactcttcatagcggttatggctgccgccaaaccacagccggttccagctggtgctcatttctttcagtgaacgacgactctctgtggtggtcagccatttttcggtggcactaaacatcagcacatcgattatgcgcagcagcgcccagttaatccgatcctcccccttgactgcccccaccagacccatggtggaatagtccgggtcattcacttccgggaacggggtgcccacgccgggcatatagaatttaaaatatttcccgtctcccccgccgtcatcatcaaacaacttgctctgatcgtcagacggcaccccgccagccgttcccgttccaatagtcgcccgaaacagccgggcgatattggtcggatgtttcggcttcgcgataaaaaagtcatgatttaagttattgccggtaccgtcgaaaaacaggctgatatgcagcgtcttgcagcacggcggctccacgcgccgtccggcagccaggcacagttcctggtgatagcgccgctcgtcgctgttctgctgatggcagttctgcccaacctgcagcgcccggcccggcagacgtccctgcggcggaaacggcggcgggacccaggcggcatgaatttcggttatttcggacatacggcgggctccttcatcctgacgggctcttttatcggatagttcgcatttctcggtgaccagcagctggtggtcaccttcacgtcatcgcagggtaaaaagtgtaccgtaatgccgcacacatcctggccgttatagtcgggtagcgggacggttttactgtgctgacggttgttttgttttaaattatctctccactctctgtatttttttgaatcagcaaatccaggaaaaccttcagtcgatgcctcaccactttcccagtcaacgcgcaccgtcatacccggcgtccagcgggcgggcacgctgaagcagcagccgccaccgccaccctgaaacggacctataatgtcgatgcccgactgaccgttgatactgaagtggttgatcgcccattttgtgtggttgatggcttttattgttccgccaccgccgcctccggcctgtgcggcaggctgtgcgcagccggttaacagcagcagacccgccagcagcgggctgattaatgcagatttcatcggactctccctgtcggtttgagggtgattaagtgaaggtgatgccatcctgaataaacgaaggcgggctacttcggacagacggcgggctccttcatcctgacgggctcttttatcgggtagttcgcatttctcggtgaccagcagctggtggtcaccttcacgtcatcgcagggtaaaaagtgcaccgtaatgccgcacacatcctggctgttatagtcaggcagcggaacggttttgctgtgctgccggttctgggccttcattttcttagcccaggcaaggtacttttcatcattgccaaagccaggaaatccttccatatcccccaccccggtttcccagtcaacgcgcaccgtcatacccggcgtccagcgggcgggcacgctgaagcagcagccgcctccgccgccctgaaacgggcctataatgtcgatgcccgactggccgttgacactgaagtggttgatcgcccattttgtgtggttgatggcttttattgttccgccaccgccgcctccggcctgtgcggcaggctgtgcgcagccggttaacagcagcagccccgccagcagcgggctgattaatgcagatttcatcggactctccctgtcggtttgagggtaatgaagggatggtgatgccatcctgaataaacgaaggcgggctacttcggacagacggcaggctccttcatcctgacgggctcttttatcggatagttcgcatttctcggtgaccagcagctggtggtcaccttcacgtcatcgcagggtaaaaagtgcaccgtaatgccgcacacatcctggccgttatagtcgggcagcggaacggttttgctgtgctgcctcttttgggcatcaatcccttttttccaggcaaggtatttcgcctcatcagcaaaccccgggaaacccgcggatgaaccctgcccggtttcccattcaacgcgcaccgtcatacccggcgtccagcgggcgggcacgctgaagcagcagccgcctccgcccccctgaaacgggcctattgaatcgatgcccgactggccgttgacactgaagtggttgatcgcccatttggtgtggttgatggcttttattgttccgccaccgccgcctccggcctgtgcggcaggctgcgcgcagccggttaacagcagcagacccgccagcagcgggctgattaatgcagatttcatcggactctccctgtcggttgagggtaatgaagggatggtgatgtcaccccggggaaacgaaggcgtgctacttcggacatacggcgggctccttcatcctgacgggctcttttatcggatagttcgcatttctcggtgaccagcagctggtggtcaccttcacgtcatcgcagggtaaaaagtgcaccgtaatgccgcacacatcctggccgttatagtcaggcagcggaacggttttgctgtgctgcctcttttgggcatcaattccttttttccaggcaaggtatttttccctatcctgataccccggaaagtccatggagtaccccaccccggtttcccagtcaacacgcaccgtcatacccggcgtccagcgggcgggcacgctgaagcagcagccaccgccgccgccctgaaacgggcctaaaatgtcgatccccgactggccattgatactgaagtgattaattgcccatttggtgtggttgatggcttttattgttccgccaccgccgcctccggcctgtgcggcaggctgtgcgcagccggttaacagcagcagccccgccagcagcgggctgattaatgcagatttcattggactctccctgtcggtttgagggtaatgaagggatggtgatgccatcctgaataaacgaaggcgggctacttcggacagacggcaggctccttcatcctgacgggctcttttatcggatagttcgc

SEQ ID NO: 229 - DNA, 3222 bp, Unknown
  source: /note="Description of Unknown: MKP2_2161_1 Mutant Bacteria sequence"
cgctggcatggaacaactgccgccatctggcgatctattttgccgtcgcctccggcggctgggtgacgcacaccgtcaatccgcggctgtcggttgaccatctgcggtatatcctcaacgacgctgccgatgaagtgctgttttttgaccagacctttttgccgctggtagcgcagctgctgccgcagctgccgacggtgaaacacgtcgtgctgatggagtcccgcagcgaagcggcgctcagccagctgccctcattgctgttttatgacgatctgttgcagcaggggatggcagactatcgctggccgcagctcaatgaactgactccggcttcgctctgctacacctcgggaaccaccggccggccgaaaggggtgttgaatacccatcgttcgctggtcctgcacgccctgagcggcaaccagccggacgccgccggcatatcggcgaaggacagcctgttgccggtggtgccgatgttccatgtcaacgcgtgggggacgccgtttatcgccgccatggtcggcgcgcggctggtgctgccggggccgcacctcgatggcgacagcctgctgcagctgctggccgccgagaaggtgacggtggggtttggcgtgccggtgatctgggccggcttgctggcggcgatgcgccggacagaggtccggctgcctgaatttaaacgtgcgctggtcggcggctccgcgctgccgccgtcgatggccgaggcctttcagcgtgattacggcattgcgctgacccacgcctggggaatgaccgaaacatcgcccatcggcaccatcaacacaccgttgagcaaacatgacgcgctcccggcacaggagcagcaaaagcagcgcgccggtcaggggcggcccattttcggcatcgaactgcaggtggtggacgtggatggcgaaccgttgccccgggatggtcaaagccagggttatctgcaggtcagagggcactgggtggtagagcaatactatggtcaggacgcgagcgccctgaccgcggcaggctggtttgataccggtgatatcggtacgctcgacgccaatggttatctggtgatcagcgatcgggcaaaggatattatcaagtccggtggcgagtggatctccaccgttgagctggagaatatcgccatcgcgcatccgggggtgcgcagcgcggcggccatcgccgcccgccatccgcgctgggacgagcggccggtgctgctgtgcgtccgtgcggaagggggcgaagtggaggagaccgatctgctgagctggtttgagaagcgggtgcctaaatggcagatcccggaccgggtgatatttgtcgatgcgctgccggtcagcgccacgggtaaggtgctcaaaaatcagctgcgccaggcctacggagagattttaatgagtgagggaaaatgagccatgcgcgacccggtctgacgacctgttctcagtatgatgcggccctgcacgccttgtcggcggcgcgccagcgctgggcggaaacctcagtgaaccgtcgtctggcgctcctgcgccagatcaaggatgccctggccggcattgccccggcgtgggtggccgcggcagcggcggccaaagggctgccggcgggcgatccgctggcgggggaagagtggctggcgggcccctgcgcgctaatggtcggctgcaacgggcttatcgccaccctggagcaactggaggagaagacctttctgcggcggatcccactgcggacgctggcggacggccgcctggcgctgcgggtggtgcccggcacgctctgggatcggctgcttctgtctggtgttcgcgctgagatatggatgcagccaggcgtcacccgggcccatctcgaccgctatgcggcgcgggcatacgacatcccgcctgccgcgcggcagggcaagctggcgctggtgcttggcgccggcaatgtggcctcgattgcgccactggatgtgctacacaagctgtttattgagaatcaggtctgcctgctgaagctcaatccggtgaatgattatctgcacgatctgctggcccaggccctggcgccgctgattgccatggatgcgctccgcatcgtcaccggcgacgcccgggcgggagcgtggctgaccacccatcccgctgtcgatgagatccatatcaccggctcccgcgagacccatgacgtcatcgtctggggcgagggtgaggcggctcgccagcgtcgggccgccgggacgccgctgaacccgcgtcgggtgacctcggagctgggcggcgtcagccccaccattatcgtacccgggccgtggagcgaggcggacatcgcttttcaggcgcagcagctggcgacgcagaagatgaacaacggcgggtttaactgcgtggccagccaggtgctgatcctgcagcaaggctgggagcctgcgacggccttgctgaatcagctgtaccgactgatcgccgcgaatacccgcccggactactaccccggcgctgaaaaccggctgacagactttcgcctgcgcgcccgtcagccgctggagatagcccgcggtgacgcgctgccgttgattgtggcgaataccgacgatgatcccgggttctgccagcaggaggtctttggcccggggctgtcggtcacccgtcttgaggccgatagtgcggaaagctttctgcgccaggcgatcggctatgcgaatcagcggctgcagggcacgctaggggccaatattgtgatccacccgcgcacccgcaaagcgattggacgtaagcgttttaatgcgctgatcgccgagctgcgctacggcacggtggcgatcaactgctggagcggggtggccttcctgttagccccttgcccgtggggggcgtttcccggccacacgctcgacgatattcagagcgggcggggcaaggtgcataacagctttatgctggagaaaaccgagcgcacggtgattgaggcgccgtttcggccgtttccgcgtagtctttggcatggcgaactgacgctgatgcccctgccgccctggttcatcacccaccgggggcaggaagcggtggcgcagcggctggtggatttttaccatcggccgcgctggcgcaaattgccggcgctcctctggcgcgcgctgcggggctaaggtgagagcaaaaaaaagggcggaaccgcggttccgccctgcgggattaacggcccgctttcagcttctggtaatac

SEQ ID NO: 230 - DNA, 2873 bp, Unknown
  source: /note="Description of Unknown: MKP2_2161_1 Mutant Bacteria sequence"
aacgttccttcaggagacttaaagtctcagggagaactcatctcggggcaagtttcgtgcttagatgctttcagcacttatctcttccgcatttagctaccgggcagtgccattggcatgacaacccgaacaccagtgatgcgtccactccggtcctctcgtactaggagcagcccccctcaattctccagcgcccacggcagatagggaccgaactgtctcacgacgttctaaacccagctcgcgtaccactttaaatggcgaacagccatacccttgggacctacttcagccccaggatgtgatgagccgacatcgaggtgccaaacaccgccgtcgatatgaactcttgggcggtatcagcctgttatccccggagtaccttttatccgttgagcgatggcccttccattcagaaccaccggatcactatgacctgctttcgcacctgctcgcgccgtcacgctcgcagtcaagctagcttatgccattgcactaacctcctgatgtccgaccaggattagctaaccttcgtgctcctccgttacgctttgggaggagaccgccccagtcaaactacccaccagacactgtccgcaaccccggtaaggggccaacgttagaacatcaaacattaaagggtggtatttcaaggttggctccacgcagactggcgtccacgcttcaaagcctcccacctatcctacacatcaaggctcaatgttcagtgtcaagctatagtaaaggttcacggggtctttccgtcttgccgcgggtacactgcatcttcacagcgagttcaatttcactgagtctcgggtggagacagcctggccatcattacgccattcgtgcaggtcggaacttacccgacaaggaatttcgctaccttaggaccgttatagttacggccgccgtttaccggggcttcgatcaagagcttctccttacggataaccccatcaattaaccttccggcaccgggcaggcgtcacaccgtatacgtccactttcgtgtttgcacagtgctgtgtttttaataaacagttgcagccagctggtatcttcgactggtctcagctccatccgcagggacttcacctacacaccagcgtgccttctcccgaagttacggcaccattttgcctagttccttcacccgagttctctcaagcgccttggtattctctacctgaccacctgtgtcggtttggggtacgatttgatgttacctgatgcttagaggcttttcctggaagcagggcatttgttacttcagcaccgtagtgcctcgtcatcacacctcagccttgattatccggatttgcctggacaaccagcctacatgcttaaaccgggacaaccgtcgcccggctaacatagccttctccgtccccccttcgcagtaacaccaagtacaggaatattaacctgtttcccatcgactacgcctttcggcctcgccttaggggtcgactcaccctgccccgattaacgttggacaggaacccttggtcttccggcgagcgggcttttcacccgctttatcgttacttatgtcagcattcgcacttctgatacctccagcatgcctcacagcacaccttcgcaggcttacagaacgctcccctacccaacaacacatagtgtcgctgccgcagcttcggtgcatggtttagccccgttacatcttccgcgcaggccgactcgaccagtgagctattacgctttctttaaatgatggctgcttctaagccaacatcctggctgtctgtgccttcccacatcgtttcccacttaaccatgactttgggaccttagctggcggtctgggttgtttccctcttcacgacggacgttagcacccgccgtgtgtctcccgtgataacattcttcggtattcgtagtttgcatcgggttggtaagtcgggatgaccccctagccgaaacagtgctctacccccgaagatgagttcacgaggcgctacctaaatagctttcggggagaaccagctatctcccggtttgattggcctttcacccccagccacaagtcatccgctaatttttcaacattagtcggttcggtcctccagttagtgttacccaaccttcaacctgcccatggctagatcaccgggtttcgggtctataccctgcaacttaacgcccagttaagactcggtttccctgcggctcccctatacggttaaccttgctacagaatataagtcgctgacccattatacaaaaggtacgcagtcacacccgaaggtgctcccactgcttgtacgtacacggtttcaggttctttttcactcccctcgccggggttcttttcgcctttccctcacggtactggttcactatcggtcagtcaggagtatttagccttggaggatggtccccccatattcagacaggataccacgtgtcccgccctactcttcgagttcacagcctgtgcattttggtgtacgggactatcaccctgtaccgtcggactttccagaccgttccactaacacacaagctgattcagactctgggctgctccccgttcgctcgccgctactgggggaatctcggttgatttcttttcctcggggtacttagatgtttcagttcccccggttcgcctcgttaacctatgtattcagttaacgatagtgtgacgaatcacactgggtttccccattcggacatcgccggttataacggttcatatcaccttaccgacgcttttcgcagattagcacgtccttcatcgcctctgactgccagggcatccaccgtgtacgcttagtcgcttaacctcacaacccgaagatgtttcacttctgattgcgaaaatttgagagactcgaacacac

SEQ ID NO: 231 - DNA, 2775 bp, Unknown
  source: /note="Description of Unknown: MKP2_2161_1 Mutant Bacteria sequence"
gagaagaccgcggcgcgtagcttgcgcaccacctcgaactcggcaatgccgaatgaggccagcaccggcagctcggccaccgtcaggggtgtccccgccgggaagaccaccgcgccgtgggcaatatcttctccgcggcggcgaatatgctgcccggcttttaccggcgcgataaagcgcacgccggcctcggtctgttcagtctcttcctgcatcaccaccgcatcgcagccttccggcaccggcgcgccggtcatgatgcggatacaggtccccgacggccaggcgtcgttgaacggctggccggcgaaggccttaccggcgaccggcagcgccgcgccgtcgcgaaggtcgttcagccggacggcatagccatccatcgccgcgttatcaaagccgggcacatccagcggggagacgatgtcatgggcggtcacacgcgagaaggcctgcaacagcggtacagtttccgtcgcgttcagcggcgtaatacgatcgagcatctgggcgagggctgtgtcgagcggcatcagtccggcggtaaaatccatgggtcactcctgcgggcaaaacagcgaaaacgcctattatggcagaaaagcggcgcgggctgtatgccacctgggtacgaggctttacatcgcccgccgctctttctatattcaaaaattgtataagacattcagcaatataatgatatcaatacccttattcatgacgtgaccggcgccgcgccgcggtacgacagggcaggggcgatccacttcatcgttaaggactggcgaaatgggcaaggcggttatagcaattcacggcggcgcaggggcgatttctcgcgcgcaaatgacgccggagcgggagcgagagtatgtggcggcgctgtcgactatcgtcgaaagcgggcagaaaatgttggccgcgggcgccagcgcgctggatgccgtgaccgaggccgttcggctgctggaggagtgtccgttgttcaacgccggaatgggcgcggtatttacccgcgatcaaacccacgagctggacgcctgcgtaatggacggctacagcctgcaggcgggcgcggtagccggggtcaaacatttgcgtaatccggtgctggcggcgcgtctggtgctggagaagagtccgcacgtattactgatcggcgagggggcggaaaattttgccatctcccacgggatggcgcgcgtggataacgatctcttttccactcctgaaaggctgctgcagctgcaggaggcgaaagcgggcggggagattatcctcgaccaccacgccgctccccttgacgaacgccagaaaatgggcaccgtcggcgcggtggcgctcgatctggccggcaatctggcggcggcgacctccaccggcggcatgaccaacaaactgcccggacgcgtcggcgacagcccgctgccgggcgcggggtgttatgccaataatgccagcgtggcggtctcctgtaccggcaccggcgaagtctttatgcgcaccctggcggcctacgatatcgccgccctgatggagtatgggcagctcagtctctattccgcctgcgagcgggtggtgatggagaaactgccggctctcggcggcagcggcgggctgatagccgtcgatcgcgaaggcaacgtcgttttaccgtttaacagtgaaggcatgtaccgcgcctggtgctatgccggcgatacgccgaccattggcatttatcgcgaatagaacaagggagagggcgagtgtcgcaaactcacgaaaccgatacctgcgaagtgctggtggtgcgcaacctgaacgtggcgttccgccagcaggatgcgccggaggtgcaggccgtgcgtcagctttccttcagcctgcgccgcggcgagacgctggcgatagtgggtgagtccggttcgggaaaatcggtgaccgcgctggcgctgatgcgtctgctagacgcggccagcagcgaggtgaacagcgaggggctgtggttgcggcggcgtaaccggcaggtgatcgcgctcaatgagcaaacggacgctgagatgcgccgggtgcgcggcgcggatctggccatgatttttcaggagccgatgacctcgctgaatccggtttttaccatcggcgagcagattgccgaatccctgcgcctgcaccaggggctggggcgcgaagaggcgctgcgcgcggcgaaaaagatgctcgatcaggtgcgtattccccaggcggaagagatgctctcgcgctatccgcaccagctctccggcggcatgcgccagagggtgatgatcgccatggcgctctcctgtcggccggcggtgttgatagccgatgagccaaccacggcgctggatgtcaccatccaggcgcaaattctgcaactcattgccgtcctgcaaaaggagatggcgatgggggtgatctttatcacccacgatatgggcgtcgtggccgatatcgccgatcgggtgctggtgatgtatcgcggtgaggcggtagagaccggcagcgttgaggagatctttcgttcgccgcagcacccgtatacgcagtcgctgctggcggcggtcccgcggctgggggagatgcgtggccaggatctgccgcgccgttttccgctgccggtccagccgctggcggagagcgaaacgcccgatacggtagtcgccggcgagccgatcctgcaggtgcgtgacctggtggcccgttttccggtgcgcggcgggctgctcaatcgcgtgacgcgcgaagtgcatgcggtggagaaggtcagttttgatc

SEQ ID NO: 232 - DNA, 2374 bp, Unknown
  source: /note="Description of Unknown: MKP2_2161_1 Mutant Bacteria sequence"
ggtacagggcgcggttgagggcatcgcggtctaccgcccctttgcccgaccacgggaagtacagcagccccagcgcgccagccagcagcagcgcgacgataaccaccaacaggctcatcgttcttttccttcttgcaataatgccgccagccgctggcgctcttcggcgctgagcgccgcgtcaggaatgtcgcgacggcgggcgcgggcgataatcactcccgcgcccgccagcacgaacaaccccggtcccagccacagcagcaccgtgcccgcggtcagcggcggctcatagctgacaaaatgaccgtagcgggccaccatatagtcaacgatctgccctttcgttttcccctgctgcatcagctcgtacaccttctgccgcatatcagcggcaatcatcgcgtttgagtcggcgatgctgttgttctggcatttagggcagcgtagttgggaggtgatctcgcggaaggcctgctcctgggcctcatccttaaactgccaggtatcgatggcggcccacgcctggccggtcagcatcagcgccagcaggatgaccattacccctctcatcaacccgccctccggttgtattgatcccacagcggctggagctcctcgcgccacacccgttcgttcaggtcgccggcgtgccgccagcggataatgccctgaccgtcgataagaaacgtctccggcgcgccatagaccccgagatccaggccaagcatgccgttgccgtcgtagaggctcagcctgtagggattacccaggcgctgcagccagctcatcgccttctggcgatcgtctttgtagttcatccccaccacccgcacgccctgctgcgccaggccgttgagaaactgatgctcggcgcgacaggttggacaccaggtggcccagacgttgagcagcagcggcttgccgtcaatcagcgtccgtcggtccagcgtctgatcgggggtattcagcgcttcaaggcgaaattccggcagcggtttgccaatcagcgccgactcgagggtcgtcgggtcatcgccctcggcgttgcgcatcagttgccagaacagcgcggcggccagcgccagaaacagcgccagcgggataaacagcagcttccggttcatgaggcctcctgcagcttcttacgcatccgatagcgcgggtcgagcatgcagcacagaccgccgagggccatcagcaccccgccgtaccagatccagcgaacgaacggtttgtagtacagacgtaccgcccagctgccgtcgctcagctcttcccccagcgcggcgtacagatcgcgggtcagcccgccgctgatcgccgcctcggtcatcatcatccggctggcggtgtaaaagcgtttctcggcatacagcgtcgcttccgggcgtccgctatgggtcacggcgataatgccttcgccgccggtccagttggggccgacgatattgcgcacaccgttaaacacaaagtgatagcggtggatatcgatgctgtcgccggggcgcatccgtacatcgcgctccacgctgtagttctggctaaaagtgatgccgataacggtcaccgccacgccgacgtgaccgagcaccatcccccactggctgcgggtcagcgtccgcaggccgcgccagaagccgtggcgatgagtggcccgttcgtgaacctccagcagggcgaagatcagcacccacagggccatcatcaggccaatgaccgccatggcggtgatacgatcctgcagcagccacggcagcgccagagaaagtgacaacgtcaccaccagagcgataatcaggcgcttaatctgtctggcgatgtcatcgcgccgccagcggatcagcggtcccagccccagcagcagcgcaaacggcgccatcagggcggtgaacatggtattgaagaacggctcgccgatggagatgctgccgaggcccagctccttatgcaccagcggcaacagcgtcccgaggagcaccaccagcatcgcggccatcagcaaaatattgttgccaagcaggaacgactcgcgcgaccacagggtatgttccacccgcgcccgcacccggccgcccttcagggcgtacagcagcagcgacccgccgatggcgacaatcagcagcgccagaataaacagcccgcgcgacggatccgaggcgaaggcatgcaccgagaccagcaccccggagcgcaccaggaaggtgcccagcaggcacagggagaaggcggcgatggccagcagcaccgtccaggcgcggaagctgccccgcttctcggtcaccgccagggagtgcagcagcgcggttcccaccagccacggcataaacgaggcgttttccaccgggtcccagaaccaccagccgccccagcc

SEQ ID NO: 233 - DNA, 2036 bp, Unknown
  source: /note="Description of Unknown: MKP2_2161_1 Mutant Bacteria sequence"
atatgtcctgggcagacggcacgatggagctgccggatgatgaaacctatggcgggctgataaaaaaatgtgttcacctggtctccgggcatgagcagcgtctctgctttccgctggactcggtgcgccgggcaaacggcaaatacccgccctgtgccactgaggtggtttacccggggatgcactcggatattggtggaggatatccgccgggggagcaggggaaagcgaatggtgaggatgacagcttattgctatctcagatagttttgcatgatttgtatgcttcagcgtttttggcaggtgctccattaaaaataccaatgatagtaattccagaaggtaaattggtagatgtatggcggataatgccaattgaacttgaagagttatttctcatttcaattgaattgatcaaacgcttcaacgcctggcgtgagcttaccctgggccaaaccacgccgaaaacgttcgatcccgatgcagcctctcactacgaaccacctgccgccggcggcagtctggaaaccgtcattgctgagcagatggcctggatcaccgcctggcgcatcgaccgctatgccagaggctcgatgctgaaaacgcccttctatcagcgcgccacgaataccgaagcgctgcctgccgcgcgtaaggcggcagaagtgattcgtgataaagaacaggagaaggtgctcagtgctcgccagaaccagatagcaaaccagcctcctgacaggatggatgagctggttctgcagccgggcgtgaaggattttgacccaaagatggatcaaacccagctgttcgacgcggcgaaggagttcggaaaggattaccacgacggttaccgtatcccggataacctggcgcagctggtgctggataccgtgctgcagccggttattttcgttctcaataccgatgatgaagcgcaggaataccggcgcatgaagcgtgacggagaggcccgggtggccgtcctctttcccgaggccggggaagccagcaacgcggagcagcctgccggactggtgagggcgctgtttgatgatcaggtgcatgactcacgcgcctggtttatgtatgccgcgctcggcacgcgcgagatgtggaccggctacttccgctaccggatgatttacttcagcgagcgctgcagtaaaccgctctcgccgctggtgctcgccggagacctggtgggttttgcgaccgtgaccgcgggtgtcgtgctcagtttccggcaaaagcgcctgaccggcaagctggccgggctggctgcgacaggcgccgtgcgctcgctggaggtggcggtgctggacaagataaccggggaagcgctgccggagctgcccggaggggcgcagctgcgggcatttacccacgagccgggaaccgttgtcgcacagcaaaaggcgcggaaagcggaagagcagctggcgcgggggcaagccgcgctgccggccagctggctggaggacgttctgacgacaacggtctgaacgcggaaaaagaggagccgatggacagggagagtccgatgaaatctgcattaatcagcccgctgctggcgggtctgctgctgttaaccggctgcgcgcagcctgccgcacaggccggaggcggcggtggtggaacaataaaagccatcaaccacacaaaatgggcaatcaaccacttcagtatcaacggccagtcgggcatcgattcaataggcccgtttcaggggggcggaggcggctgctgcttcagcgtgcccgcccgctggacgccgggtatgacggtgcgcgttgactgggaaagtggggaagcttcaactgatgatttcccgggatatgaaaactggaataaatatcttgaatgggaaaagaaaataaaagccagtcatcggcagcacagcaaaactgtcccgctgcccgactataacggccaggatgtgtgcggcattacggtgcactttttaccctgcgatgacgtgaaggtgaccaccagctgctggtcaccgagaaatgcgaactatccgataaaagagcccg

SEQ ID NO: 234 - DNA, 2006 bp, Unknown
  source: /note="Description of Unknown: MKP2_2161_1 Mutant Bacteria sequence"
tcctctctggtctcgtgggctcggagatgtgtatacgagacggggggtgaatatgcggccccacggcgatgaccagatcggccaatgccaccccctgctggcgaaaacaggccagactgttgtcgacaataccgctgaccagcccctgccagccggcatgcacgctgcagacgtagcgaccgtcgcgcgaggcgatcagcagcggcagacagtcggcggtcaccacccccaccttttgcccggctaccgcggtaaacaccgcgtcggcgtgcgggcgcgtcggcagcggctgctgataatgatgaacctcattaccatgcaccagcttcaccggagccagctcggcatagggaaaggcggcggtttcatggacatcaagaaaagcgtggcggatgccagggatcgcattgagcaaacgggaggtgtaagccatagggacgataagcgtcagggaatgatgtcttaccttaggccaggggacgcggacaggcaaggcggcggcccggcatttttttaccagaccgccggatgcatatcagaccatggccgcgcgctgctggcgatgcatcagccagaacaccgccacgccggccagcacaatgcccggcgccgaggccgccatcaccccgacggcgccggtgccgagggccagcatcttgccggccagcagcgggccgctcatcgccccaagacgccccaccgccacggcggtgcccaccccggtggcgcggatggccgcgggataaaaaagcggcgccagagcgtaaagcacactttgtccgccggtggcgaacagcccggcgacaaaccccgccagcagcatgccagtcagcgacgacgcgctgcccagcgccagcagcgacgccagaatgccgctgtagatcaggagcgacatccgcagcggggtgagcttatccattagcgcccccagcagcagcgtgccgcaggcggcgccgatctgcagagagaacatcacccccgccgcctggctggcgcggaatccctggcccaccagcagcatcggcagccagttgatcagcatatagaccaccagcagggtgaaaaaataacccagccacaacagcagcgtagcggcggcctggcccggggcaaacagggtgcgcagcggcacgctggcctccgcgcgctgaaacgcctgcgactccggcagccagcgcatcagcaacgggatcagcagcagcgggaccacgccgccaatccagaaaataatctgccaggccgcggcgagaccggaaaagcccagcgctgccgccagcgcggcgccaatgggtacgccgcagtacatcaggcttaccgcccggccgcggaaacgtgagccagcggcttccgaggttaaggcaatcaggttcggcaatgccgccccgagcccgacgccggtgagcaggcgcgccagcagcagcgtcgggaagctccatgccagcgcggtggccagcgagaacaggccaaacagcagcaccgaccccaacagaatgcgcttacgcccgtggcggtccgccagcatgccgcccaccagcgcgccgggcagcaggccgaggatcccggcgctgaagatccagcccatctgcattttatccagcgcaaaggcctgcgccatgccgacggcggcgatccccgccgcctgcagatccagcccttccatcagggccaccataaaacagagcccgatggtgaccaccaggcgcgagggggttgcagtcgttatcttggtcatagggtaccttggcgatagccgaacaaacggagcaggtgactggcggctgatgctttgtcagccgcacgttcttagttatttattgcggttaagcagatccagcgcgacgtcgacgatcatatcctcctggccgacgaccatcccacgcctgcccagctctacgagagtacccaccgcgcccaggccataaggccggctctcaaaaacacccgacccgccacaccagcggtcgaggggacgcgcgcggggtggtggagccgctcaacaaccaaca

SEQ ID NO: 235 - DNA, 1903 bp, Unknown
  source: /note="Description of Unknown: MKP2_2161_1 Mutant Bacteria sequence"
ctgagcatggacgctgtacagaaagccaaatccggccacccgggggccccgatgggtatggctgacattgccgaagtgctgtggcgtgatttcctgaaccataacccgaacaatccggcctgggctgaccgtgaccgttttgtgttgtcaaatggccatggttcgatgctgatttacagcctgctgcacctcactggctacgatctgccgattgaagagctgaaaaacttccgccagctgcactccaaaactccgggtcacccggaagtcggctacaccgcaggcgtggaaaccaccaccggtccgctgggccagggtatcgctaacgcggtcgggatggctatcgccgagaaaaccctggcggcgcagttcaaccgtccgggacacgatatcgtcgaccactacacctacgccttcatgggcgacggctgtatgatggaaggcatttctcacgaagtgtgctccctggccggtaccctgaaactgggtaaactggtggcgttctatgatgacaacggcatctccatcgacggccacgttgaaggctggttcaccgacgacaccgccaaacgctttgaagcctacggctggcacgtggtgcgcggcgtggacggtcacgacgctgacgccatcaaacgggcggtagaagaagcgcgggcggtcaccgacaaaccgtccctgctgatgtgcaaaaccatcatcggtttcggttcgccgaacaaagccggtacccacgactcccacggcgcgccgctgggcgacgccgaaatcgccctgacccgcgaagcgctgggctggaaacacgcgccgtttgacatcccgtctgacatctaggcccagtgggatgccaaagaagccggccaggcgaaagaagcggcgtggaatgagaagttcgctgcctacgccaaagccttcccgcaggaagcagccgaattcacccgccgtatgaaaggcgatatgccgtctgacttcgacgcgaaagctaacgagttcatcgcgaagctgcaggccaacccggcgaaaatcgccagccgtaaagcctcgcagaacgccatcgaagccttcggcccgctgctgccggaattcctcggcggctccgcagatctcgcgccgtccaacctgaccctgtggtctggctctaagccgatcaacgaagacgctgccgggaactacatccactacggcgtgcgcgagttcggtatgaccgctatcgccaacggtatcgcgctgcacggcggcttcctgccgtacacctccaccttcctgatgttcgtggaatacgcgcgtaacgcggtacgtatggccgcgctgatgaaacagcgtcaggtgatggtctacacccacgactccatcggtctgggcgaagacggcccgactcaccagccggtagagcaggtggcttccctgcgcgtgaccccgaacatgtccacctggcgtccgtgtgaccaggttgaatccgcgattgcgtggaaatatggcgtggagcgtcaggacggcccaaccgcgctgatcctctcccgtcagaacctggcgcagcaggagcgtaccgcagagcagctggcgaacgtggcccgcggcggttatgtgctgaaagagtgcgccggccagccggagctgatcttcatcgccaccggttcagaagtggagctggcggttgccgcatgggacaaactgactgccgaaggcgtgaaggcgcgcgtggtttccatgccgtccaccgacgcgttcgacaagcaggatgcggcttatcgcgaatccgtactgccgaaggccgtgaccgcgcgcgttgccgtggaagcgggtatcgctgactactggttcaaatacgttggcctgaacggcgctatcgttggcatgaccaccttcggtgagtctgcgccggctgagcagctgttcgaggagt

SEQ ID NO: 236 - DNA, 1788 bp, Unknown; identical to SEQ ID NO: 96
  source: /note="Description of Unknown: MKP2_2161_1 Mutant Bacteria sequence"

SEQ ID NO: 237 - DNA, 1739 bp, Unknown
  source: /note="Description of Unknown: MKP2_2161_1 Mutant Bacteria sequence"
gcaggttattcacccgcccctgacgggcaaactggttgttccagtgcatcggaacaaacagcgagccggggcgctgcccttcgctgatcgccactttcgccaccatcaccccatgccgcgaccagatccgcgccagcccgtcagcgggaagctgatagcgaacggcatcctgcggcgccacctccaccattggctccgcgatatgctgcatcagccgcggcaccgcgccggtacgggtcatggtgtgccactgatcgcggatccgcccgctgttgaggatcagcggataaaaggcatcggttgtcgcccgggtcggttgaggcgtcaccggcaccatccgcagcctgccatcgccatgccagccgcgcgtgatatcccaggcgacctcgctgcggctgaccggccagcgcaccggcggcatggtgtcccacgcctcacggctgagatccgccagcgcgccgatatcaaacgcccgctggccgtcgttttcgaaaccggacagcgccgcatgctcgcggaagacgtcatgcggatgctgccaggcaaacgcctcgcgataccccagagcctggcccactctggcgatgatccaccagtccgctttcgcctcccccggcggcggcagaaagctgcgctgacgggagatccgccgctccgagttggtgaccgtgccattcttctcgccccaggccagcgccggaaagcggatgtgggcgaaacgtccggtatcggtctgggcggcgacatccgagacgatcaccagcggacaggcggccagcgcctggctcaccgcgtggctgtcagggagcgacaccaccgggttggtacccatgatccagaccgctttgacctcgccgcggccaatggcggcaaacagctccacggcggtcagcccgggggtctgcgccagccgttccgtcccccagaagcgggccagccgctgcagatcgtctggcacaaaatccatgtgcgccgccagcatcgtcgccagcccgccgacttcgcggccgcccatggcgttgggttgaccggtcagcgaaaaggggccgcagccgcggcggccatacttcccgctggccagatggacgttgatgatggcgttacatttgtcgctgccgctggcggattgattgattcccatggtgtagagggtgatcgcccgcggggcggcgatgaactcgcgatagaatcccgccacctcatcggcaggcagaccgcaaaaggccgccaccctcgccacgtcccagccgcgggcggcggccagcgcctgcgggccgtcgcgaaagccatcgacgcaggctcctgcctcagccagggcgttaagcagccccgcaaacaacccgccgtcgcttcccggggccagcgccagatggcggtcggcgatctcgcaggtagcggtgcgtcgggggtcgatcaccacgatccgcaatcggggattatcccgcttcgcctgcgccagccgctggaacagcaccggatgcgcccaggcggcgttcgagccgaccagcaccaccagatcgctgttttccacatcatcgtagctgcagggcaccacgtcggcgccaaaggcccgcttgtagccagtgaccgctgacgacatgcacagccgtgaattggtatcgatgttcgccgcgccgataaaccctttcatcagcttattggcggcatagtaatcctccgttaacagctggccggaggcgtaaaaggccaccgcttgcggtccgtgctggtcgatgatc

SEQ ID NO: 238 - DNA, 1656 bp, Unknown; identical to SEQ ID NO: 98
  source: /note="Description of Unknown: MKP2_2161_1 Mutant Bacteria sequence"

SEQ ID NO: 239 - DNA, 1587 bp, Unknown
  source: /note="Description of Unknown: MKP2_2161_1 Mutant Bacteria sequence"
aatattcctggataacgtcaagcgcgctgacgagctggttaacggtccggccggaacggttaacgaccgcgcaggcgaaccgctcgatacctggcgccagatgatggctaagaatgacgaagttcggcagaacatcatcccgctcagtaagcagtatcaaacgctggaggctgcacaggcggatatcgcgaatattccggtgggctcgaccacgtactaccgtagcccggacgacagcgcgctcgcaatcgaggtgatgaacgctggcgggacgctgcagcctaccgggcgccgtatgccttcatatgacctggtggcggccatcagccaggcagtaacggccgaggtcatggcccgaacaggtctgatattcagcagcgatgaccagaccatgctctctttgtgcgatgaatggggatatgaagccgggcggatcactgagaacagtttcgaaacgagaaaactcagactgatccagtcagagacaggtccgctactgacgctggttgatgatttcggttatgcggtgaatctgttttccgaaagaggcgcgctggttgccggaaataatgagttgtcagattcagagtcgcttatttccttccctgatgaattcgggaacgagctgattctggttgataagcaggggcggctgtatgccggggataacatcatatttgacgcgccggactgggcacgctgtaccgttgaccccttcgggtatgttatcgaaggcgtgaaattaaatggtgatgtggtcagcaagaatggaggcggcggtagcgtcgaacctgtgccctctgtgctggagagcagcgcagcagcgcactggctgtttggctatgagtccacgtcgtatacaagccgtgtggggtataaaacgctgacaccgcaggccgcgccggaattcaataacaattacatttcgatctccgcctggggcggcgcgctgatgaccgatatccccgatgccggggaatacactgtctgcgcggtggtcagggtacctgaacaggccccgttaaccgactgcgtggtgatttacggcacacagaacgggtattcacttcgggatgacgacgacacctacaccggcaatcagctgtcgatgttttccgacagggatgatcggcgatggctgcgtgtgaaaaattccggttaccggggaacgtcccggcattatccgacactacaaccgcctgtcggccagtggctgttcatttcacatgtagtgaaacttgagggcagcgggctgcgttaccaggcaatcagcgtgggtggcgaagaatatcagatgctgcgcgaggccgatgcagatcgcctgattctttccggccgcaacatcgccattggcaacgggtggtgtgataacgccatgttcaaaaccaaaaatctcgacatcgctgaattcatctacttcgaccattcgctttctgcgcaacaggtccaggccgtatatcacaattcccgccagcgtatggctgagcgcgcacttaacttacagtaaaggagtctccctatgggcacagcaattatggccgctggcactgatgcatcagcgtacgcaaataattatcttccgccggt

SEQ ID NO: 240 - DNA, 1510 bp, Unknown
  source: /note="Description of Unknown: MKP2_2161_1 Mutant Bacteria sequence"
acaattcccgccagcgtatggctgagcgcgcacttaacttacagtaaaggagtctccctatgggcacagcaattatggccgctggcactgatgcatcagcgtacgcaaataattatcttccgccggtatctggtcctctggcatgggcaaatctggagagtaacgccctcacagaggcgcgtagactcaagaattggggcaagaacggcggttcctttgcactgtcaggcgtcgcacagcttgtcgctaaaggtattgaggcagcggcagggaccgaaagccgtttgacgctgggtaattttacaccggatgcttacaccctgatcgcactcgttgatgtaggcgcaagcgcaggggttattcggcatcgaaatatccgcatcatgacggatgcaaataaaaaaatttggcgagtgatggatgcagggacaagtttatcgaatatcacggctccagcgaccggagctttcgtcgtatttctaaaaggcgacttaaccggccattctttcggcatggcgacgtcaaccggtgtacagaaggttgactccacagcggtgaacacaaccacaaccgatactttcatcggcggaaactgggaaaacggtactgctgctgcctggaaggcttatggcgctgctttctacgacagaaagctgagcgatagcgagctaatccaagtcgcagaacgcctgatcaagcgcgccaagtatctcggagtgacggtcaatggctaatttcacgtcatcattgatctcagactctgcgtctgagagcaaccaggctgggtggtggcacccgctggatagctttcagggggcggagtattacgggatttgtaaagaatatggggtcgccggtaagcaccaggtagaactggtaaaacgtgccgctgacggcacgttgacccgtagcctctgcaaaaacacggatggaactaccgccgaattcgacaatgatatcgggcataacaacccatctgtgatcgttgacggcgacgggtccatccacgtgttcacttcaatgcacatgaaccttctgcgctattttaaaagtgcagcgccaaatgatgttacgaatatggtggacgcgtcgtggaacttccccgacgtagactggacctatacttaccccacggtagccaggggaccggaaggtgacgtatacgtcatgatgcgccggtctaaccgtaccccggtaaacgataccaagcgtccgggggttgtttatcgctaccgtctggcctcgaaaacgtgggagcgctatgcccccgtagccgaagcagataaccgttccatctacccggacgatatgatggcgttcgccgatggcctacaccttctgttccagtgggcacattacccatcctctgccgttcgtcatgttggggaatatggcgtcattggtaccgatggactgatgagaacgataaataacacgcccctgccaatgccggtaacgcagggacagctggcgtataagccattgcagccgggtgaaaacccggcgataa

SEQ ID NO: 241 - DNA, 1510 bp, Unknown
  source: /note="Description of Unknown: MKP2_2161_1 Mutant Bacteria sequence"
acaattcccgccagcgtatggctgagcgcgcacttaacttacagtaaaggagtctccctatgggcacagcaattatggccgctggcactgatgcatcagcgtacgcaaataattatcttccgccggtcactggcccgctagcctgggccaatctggaaagcgatctgctgccggcaggtcggcgccttaaaaacttcggtagcctcggaggtacctttgcgctgtccggtattgctcagctggtagcaaaaggtgttgcagcggcagcgggtacggaaagccgtctgactctgggtacctttacgccggatgcttacaccttcatcgtgctggtcgacgtgggcccggatgcagggatactgcgtcaccgcaatattcgtatcagcacgaatgccagcaaaaagcttcagcgcgtcatggatgccggtacaagcgtttcggatatcactgcgcctgcaacgggcgcgttcgccgtattcctgtgtggtgacagcaccgggcatgcgtttggtattgtgacggcttcaggtattcagaaatccacctccacggcggtgaacagcgggacgactgccacctggatgggagggaccaatcaggcaggcctggcagcagcatgggcaggctatggttcggctttctatgaccgaaagctcagtgacagtgaaatggaacgggtggcagaacgccttattaaacgggcgcgttatctgggagtaacggtgaatggctgatttgtcgatttcggttatttcagaccaggcatctgagagcaatcaggcggggtggtggcatccccttgacagctttcagggagtggaatgttacgggctgtgtaaagagtacggtaccgccggttatcatcaggtcgaaatcgttcgccgtgatgccgatggtaccctcacgcggggaatgtgtaagaacgtcgacgggacggtcgcggaatttaacaatgacgtgggccataatcagccatctgtggttgtggacggtgcgggatatatccacgtgtttacgtcgatgcacgttaacctgctgcggtactttcgcagcgcgcgccctggcgacgtgtcgcaaatggtggatgcgaccctggactttccggatgtggactgggtctggacgtacccgatcaccggcagaggtccagatggtgatgtatattgtctgatgcgggtcgccagccggagcaccaccggggaaaataaacgcgggggtatcctttaccgctttgacgtcggcacgctgcgatggacccgttatgcgcatgtggctgaaacagccaaccgcgctatttacccggatgatatagccattaacgaggacggcgtccatcttctgtttcagtggtcggcctacccgtcttctgccgtccgccatgtcggggaatatggcgtcattggtaccgatggactgatgagaacgataaataacacgcccctgccaatgccggtaacgcagggacagctggcgtataagccattgcagccgggtgaaaacccggcgataa

SEQ ID NO: 242 - DNA, 1438 bp, Unknown
  source: /note="Description of Unknown: MKP2_2161_1 Mutant Bacteria sequence"
ggggccgccacgccggctgccagtagccgctttgcgggcagggctcaccgctgcggcactgcagccgcgccacgctgtccttctcaaagtccggtgacgtcggcagcggcctgcccgtcgccgggttaagctgtttcgcctgcgccagtttctctatcagcgctgcgctgggttctggcggcgggatattggcctcccgttcctccagccacttcagcttgccgtcccattccggcagcggggccggcggcagcggcacgatatcgttgatttccgggacgacaggatgggcccatgagtatttcgccaggaccttgactatctgctcataacgacgggcacgctcgggatccttttccaatgccagatagaacagcctgtccgttggttcaggtccggagaatccgtgcatcaggaaaccggctgaggttgaatctcctgctgcaacgcccagttggaaaacctcaactgcctccggatattttttgtaaattgcaagcatatttcctaacgaattagctgctttcccttccccctgttcagcggcacattgaaacatctgcatggccacttgtggtgccattttggccggaaacagtttttcaccaacataagcctgggcctggggattcccttcatctgccgccttacgatagtagcgcagcgccatctctggatccttcgccagtcctgccgcaccgtgctccagatagatggcaataaagtagtagccggcggcaaccttcgcatcaatcagttgttggctcagacgcaaaagttcagtgctgctcagcgaaaaacgcccgcgcagcgcaccgttctgcaggttaatactggctttgtaatgcccgttttccgccgcgatgcgatacagtcgcgcaatttccgcatccaccattttatcccggttaatcaggttatttttctgccaccagcgggcatatttaaacagaacatctgtatcagcagatgcctcaggaataatctgatgtttacaggtcaacgccaggcgggcattaatatcggtcagcgggttcaccggcacatccttgtggatgcttttctggtcacagcctgacagcagcaggctgcccagcactatccatgtcgttatccctttcattccctgacgctctccttttccttatcttctgcagagcttatgcctcgccgacacggcgccacaccgtctcctgcgcttccacgaccagtctgtcgcgcagcggccagggacgtgggcgaacgaaggtcaccttctccaccggcatgatgtctccctcgcggaaataacggatggcatgttcgctcattccttcacggggccgccacgccggctgccagtagccgctttgcgggcagggctcaccgctgcggcactgcagccgcgccacgctgtccttctcaaagtccggtgacgtcggcagcggcctgcccgtcg

SEQ ID NO: 243 - DNA, 1364 bp, Unknown
  source: /note="Description of Unknown: MKP2_2161_1 Mutant Bacteria sequence"
tttcaccttccgccgccggagggggcagcagttcgctcagccagcgcacaaaggtgcgcgccgctgccgcgccgcgggaaaaaccatagacatacagcttgatgcctgtcagtttcggcttgcccggctcaggctgaataatcaggggcttcaaatcagaggccaaatcattcagcaaacgagtgaactcttcatagcggttatggctgccgccaaaccacagccggttccagctggtacccatttttttgagggattcacggctggctccttcggacagctttatgctattgttttccttgtccttactcaggcgcattagcacatcaataatccgcagcagcgcccagttaatccgctcctcccccttaactgcccccaccagacccatggtggaatagtccgggtcattcacttccgggaacggggtgcccacgccgggaatataaaacttgaagtattttcctccactgtcttttaccccatccagtggcatctttttggtatcagtgacgccgccggcggtgccgtcgccaatggtggcacgaaacaaacgcgcgatattggtcgggtgcttcgggtcagagagcagcaggtcattgttcaggttattacccgtaccgtcgaaaaacaggctgatgtgcagcgtcttgcagcacggcggctccacgcgacgtccggcagcccggcacagttcctggtgatagcgccgctcgtcgctgttctgctgatggcagttctgcccaacctgcagcgcccggttcggcagacgtccctgcggcggaaacggcggcgggatccaggcggcatgggtttcggttatttcggacatacggcgggctccttcatcctgacaggctcttttatcgggtaggacggactgccgtaggtgtaacagctggtggtcaccttcacgtcatcgcagggtaaaaagtgcaccgtaatgccgcacacatcctggccgttatagtcgggcagcgggacggttttgctgtgctgacgttttagtgctttgatttttttataccaaactcttttttgttggttatattctgctatttcttcggtccagactttattatcctgccctttataattcggataagcaggttcaggaatttcaggaatgtctctggcaaatgcgactccactttcccagtcaacgcgcaccgtcatacccggcgtccagcgggcgggcacgctgaagcagcagccgccaccgcccccctgaaacggacctataatgtcgatgcccgactgaccgttgatactgaagtggttgatcgcccattttgtgtggttgatggcttttattgttccgccaccgccgcctccggcctgtgcggcaggctgtgcgcagccgg

SEQ ID NO: 244 - DNA, 1336 bp, Unknown
  source: /note="Description of Unknown: MKP2_2161_1 Mutant Bacteria sequence"
tgatcttgaccctccatctccgaacagcttttgtatcttaagttaacgatgtccgctgccgccggtattccctcggggagtgatatcccagcgcgctgtgcgggtggttttcattgtaatgcgtgaacgctactgcaaggtttcgcagtgctgttctcacatccggttttggcatgaacgcgatatagtcttctttcatcgttttcacgaaccgttcggccatgccattactctgcgggctgctcaccgctgttgtgcagggctccagattcagctctctcgcgaacctccacgtttcatacgcggtatacgctgaaccgttgtccgtcagccactgcaccgctgtatcgggcaacctgtcgccgaagcgcttttccaccgacctcagcatcacatcctgcacggttgaactgtcatagcctcccgtgcttgctgcccagtctatggcctcacggtcgcagcagtccagcgcgaacgttacccgcagtttttcgccgttgtcgcagccgaactcgaagccatctgaacaccagcgcatatcgctttctgccaccgctatcttgcccttatgttcacgcttcggtcgctctggtttgtcatgcaacaacaacaggttatgctcgctcattatcctgtaaagccgtttggcgttcacaggtggctgtccctctgtgcgacgttgcttgcgcaggatgccccacacgcgtcgataaccataactcggcatatcgctgatgatgtcgaggatagccgacagtatttcttcgtctgcttcgtcattacgccggttacagcgcttgtcctgccagtcggcagaacggttaatccgcagtgacagctgcgcacgcgacacgcccatggtgcggctgaccagggctattccccgtcctttggcaacaagggcgcgtgcgctatccattttcgcgactggccgtactccacggcttctttcaggatctcaacttccatcgtcttcttgcccagaaggcgctgaagttcccggacctgcttcagagcagcagtaagctcagaagcaggaacgacttcctctccggccgcaacggcggtgaggctgccttcctgatattgcttcttccacttaaacagcaggctgggctggataccatgcaggcgggcgacatgggagacattcatgcccggctccatcgtctgctggataatggcgatcttctcctgaggagttttacgtttacgggcttcttgccctaacaggatcccggtcatctcaaaattggcgttagtgttagacatatattcaagcctatctcttatctggagatacagctactgtccggtgtttcagggggctacatca

SEQ ID NO: 245 - DNA, 1218 bp, Unknown
  source: /note="Description of Unknown: MKP2_2161_1 Mutant Bacteria sequence"
catcagcagggaaaagtcgttagcgaatttccccagcgtgccgcagacgccggcaaaccaggcgcccgcctccagcagccgatcgcgctggctgtgccacggagtatccggcagcgacagaccgaggatctgcgccagcgccaggccaaccgccggccctttctcttttagcgcgtccagagtgcccgcggcgccgccgaactgcagcaccagcagccgcggacgcatctcgcgcagccgctgctgccagcgcaggagcgcgtcgagggtgcccgccagcttcaggccaaaggtcaccggcagcgcgtgctgcatccaggtccgtcccggcatcacggtatcgcgataacgatccgcctggagtgccagggccgccaacagctgctcaagcagagtctcagcggcatccagcgccccgcgcagctggagcaccagtccggtgtcgatggcgtcctggctggtagcgccccagtgaacgtagcgcgcagcctcgggatctcgcgcttttacctgggccgtcagctgtttcaccagcgggatggccagattaccggctcccactgccgcctcgcccagcgcggcaaaatcgatggcttcgtggcggcaggccgccacaattggcccgaccgcttccggcggcaccatcccgcaggcggcctgcgcttgcgccagcgccgcttcaaaatccagcatgccctgcacccgctgcgcgtcgctgaaccagtcggttagcggactgctgcgcagcatcggggtcaacaaactcattctggctccttaaacacgttcaataatcagggcgatcccctgtccgacgccgatgcacatggtgcacagggcgtaacgaccgccggtccgtttcagctgataagccgcggtcatcgccagccggccgccggaggcgccgagcgggtggcccagcgcaatcgccccgccgttagggttcacgtgggcggcatcgtccggtaagcccaaatcacgggtcaccgccagcgcctgcgcggcgaaggcttcattcagctcaatgacatccatctggcctaatgtcaggccggtctgcgccagcaccttgcgcaccgccggcgccgggccaaaacccatgatccgcggcgcaacgcccgccgtcgccacgccgaccacccgggccagcggctgaagatcgttggccgacagcgccgtctcgctggccagcagcagcgcgcaggcgccgtcgttaac

SEQ ID NO: 246 - DNA, 1197 bp, Unknown
  source: /note="Description of Unknown: MKP2_2161_1 Mutant Bacteria sequence"
gcagcggtctgcccgttgccgggttcagctgtttcgctttcgccagtttctctatcagcactgcatcaggcgctggcggcgggatattggcctcccattcctccagccacttcagcttgccgtcccactccggcagcggcgccgggggcagcggcacgatatcgttaatttccgggacgacaggatgggcccatgagtatttcgccagcacagcacctatctgctcatagcgacgggcacgctccgggtctttctccagtgccagatagtacagcctgtcggtcggtgccgggcctgcaaatccatgttcaaggaaactggcggagcctgaatctcctgcggccacccctaactgatagacatctacagcgtcctgatatttctggtcaattgttagcataattcctaacgaattagccgcttttccctcaccttgtagggcagcgcatcgaaacatctgcatggctacctgaggagctcttttggccggaaatagtttttcgcctaaaaaagcctgcgcctggggattcccttcatctgccgccttacgatagtaacgcagcgccatctccgggtcctgcgccagccctgccgcaccgtgctccagatagatggcaataaagtagtagccggcggccaccttcgcatcaatcagttgctgactcaggcgcagacgttcatggctgctcagcgcaaagcgcccgcgcagcgcgccattctgcagattaatactggctttataatgaccgttttccgccgctatccggtacagacgggcaatctccgcatccaccgttttatcccggttaatcagattatttttttgccgccagcgggcgtatttaaacaggacatcggtatccgcagacgcctcaggaataatctggtgtttacaggtaaacgccaaacgggcattaatatcggtcagcgggttcaccggcacatccttgtggatacttttctggtcgcagcctgacagcagcaggctgcccagcactatccatgtcgttatccctttcattccctgacgctctccttttccttatcatctgcagagcttacgcctcgccgacccggcgccacaccgtctcctgcgcctccacgaccagtctgtcacgcagcggccagggacgtggccgaacgaaggtcaccttctccaccggcatgatgtccccctcgcggaagtaacggatggca

SEQ ID NO: 247 - DNA, 1059 bp, Unknown
  source: /note="Description of Unknown: MKP2_2161_1 Mutant Bacteria sequence"
taggctttgttgaataaatcagatttcgggtaagtctcccccgtagcgggttgtgttttcaggcaatacgcacgctttcaggcatacctgctttcgtcattttgttcagcgctcgtaccagggccatagcctccgcaacctgaccatcgtagtcacgcagcgtcagtgaacccccgaacagctgttttacccggtacatcgccgtttccgctatcgagcgacggttgtaatctgttgtccatttccaccgcgcattactcccggtcatttgctgattagccactgcacggttacggtctgcatattcaccgggccagtaacccgcaccttttcggggtgggataagcgcgctgattttcttacgccgcagttcatcgtgacagagccgggtgtcgtaagcgccgtctgccgatgctgccctgatttttctgtgagtctgccggataagacccgggaaggcttctgagtccgtcacattgttcagcgacaggtcagcgcagatgatttcatgtgttttactgtcaacggcgagatgcagcttacgccagatacggcggcgttcctggccatgctttttgactttccactcgccttcaccgaagaccttcagcccggtggaatcaattaccaggtgtgcgatttcaccccgggtgggcgttttgaaactgacattaaccgactttgcccgcctgctgacacagctgtaatccgggcagcgtagcggaacgttcatcagagaaaaaatggaatcaataaagccctgcgcagcgcgcagggtcagcctgaatacgcgtttaatgaccagcacagtcgtgatggcaaggtcagaatagcgctgaggtctgcctcgtgaagaaggtgttgctgactcataccaggcctgaatagcttcatcatccagccagaaagttatggagccacggttgatgagggctttattgtaggtgggccagttggtgattttgaacttttgctttgccacggaacggtctgcgttgtcgggaagatacgtgatctgatccttcaactcagcaaaagttcgatttattcaacaaagcc

SEQ ID NO: 248 - DNA, 1049 bp, Unknown
  source: /note="Description of Unknown: MKP2_2161_1 Mutant Bacteria sequence"
ggcggcggcggggggcggtgcgccagcgcggccgcgggggggtgcccctgctgggttgttgtgcgtgggatctcggcaggccccccgccctgtggtgtggggtttgcgcgctgtgtgcacggagcagcccaccgccatggcggtcagcagtaggcgtgttagcgaaggcagggtcagcacccagaaaatacgcgtcgatccccagccgagcgtgcgggcgacaaccgtcagccgcggatcgcgctggcgccaggccgggcgcaaaataaacagcatccagggcaccacccacagcagatggccccacaggacggtccaccagtcaccgtcaagccaggcatacagcgccaaccggtactggccgtcggccagcggcagggccggcaggaccagcggtagccagacccagccatcgcctcgcgccgggccgcaggccagccacagcaggcagacagccgcgccgagggcgcaggccgccagcgccagcccaaggctgttgcccagagcatccatctgcggcggcgccgagcgcgccagccccgccagcaatagcgcgcccagcagaccgctcagcggcagcagcgccgccagcaggcggccgggcagggcatgaggatgcgggtgacgaacaccgtgcagatcgggctggtactggcgctgtagccgccatccgccccaggcgaccagcgccagcccgccgaggatcgccatcagcagcaggctggccagcgcccctttggcctgctgcagctcatcgccctggcttaaccattgccacgccagcacggcgagggtgggcggattgccgggccccagcaccagggcgacgtctaccgccgacaggctccaggcggtggtggccagcagcaccatgccgagggcgggcagcagggcgggcagcaccagccaacgcaggcactgccagcggccgtagccgaggctcttcagggcggtcgcctggtcggcgaggcgtttctctcccagcaggccatagaccgggactgacaaccaccggaaccggccgcggcgcgggagggggtcggacgcgg

SEQ ID NO: 249 - DNA, 1013 bp, Unknown
  source: /note="Description of Unknown: MKP2_2161_1 Mutant Bacteria sequence"
gtacttgcgtacgagctcttcttaaaatatggcggtgagggggggattcgaacccccgatacgttgccgtatacacactttccaggcgtgctccttcagccactcggacacctcaccatattgtctttcccgttgttgtcgggaacgggcgctaatgtagggaaatacgtatcgcccgtcaatcaactttttgcaaaaaaagcgcgtttagacaaacttcgagcaacttgctccttaaacgtgcgaaatccgttttttttgtcgccagtagcttttcccttttcgctccggggaaatttgttatgctggcaaaccaatagaaaacaatgagtaaaataagacgccagcgtcaatcggccaaaggcgtctgctatcaggagcccctatggagattattttttaccatccgacctttgatacccaatactggatctgtgagctggaaaagcagttacccggcgcgcgggtgcgcgagtggaaagcaggcgataaccggccggcggactatgccctggtctggcatccgccggtagagatgctgcagggccgggcgctgaaggccgtgttcgccctcggggcaggggtggactctattctcagcaagctgcgcgaccatccggatatgctgccgctgtcgattccgctgtttcgtctcgaagataccggtatgggacggcagatgcaggagtatgccgtgagccaggtgctccactggttccgccgctttgatgactatcaggcgctgaagctggcttcccgctggcagccgctgcccgagtaccgcgccgacgaattcaccgtcgggattatgggcgccggcgtgctgggggcgaaggttgcggaaagtctgcaaccctgggggttcccgcttagcgcctggagccgtagccgcaaacactggccgccggtgcagagctcggccggcacagccaggctgggagaacgacaacaggggaggggcgcacagagcgaccggagcccgacggaggcccgcacacacgcgccccggaaag

SEQ ID NO: 250 - DNA, 911 bp, Unknown
  source: /note="Description of Unknown: MKP2_2161_1 Mutant Bacteria sequence"
ccgccttcacggattgcgaaacgcagaccgtcgtccatcgcgatcgggtggatcagggtaacaaccattttgatgttgtcgcccggcattaccatctctacgccttccggcagttcgatggtgccagtcacgtcagtagtacggaagtagaactgcggacggtagcctttgaagaacggagtatgacggccgccttcgtctttggacaggatgtacacttcagattcgaacttggtgtgcgggttgatggtgcccggcttagccagtacctgaccacgttcgatttcttcacgtttgataccacgcagcagaacacctacgttctcaccagcacggccttcgtccagcagtttgcggaacatttcaacgccagtacaggtggttttcgcggtttctttgataccaacgatttcaacttcttcacctactttgatgataccgcgctctacacgaccggtaacaacggtaccacgaccagagatggagaatacgtcttcgatcggcagcaggaacggcttgtcaatcgcacgctctggttccgggatataggtatccaggtggccagccagttcgatgattttcgcttcccactctgcgtcgccttccagcgctttcagagcagaaccacgaacgatcggggtgtcgtcgcccgggaaatcgtactgagacagcagttcacgaacttccatctcaaccagttccagcagctcttcgtcatcaaccatgtcgcatttgttcaggaacacgatgatgtacggaacgcctacctgacgacccagcaggatgtgctcacgagtctgcggcatcgggccgtcagtcgcagcaacaaccaggatcgcgccgtccatctgcgcagcaccggtgatcatgtttttaacatagtcggcgtggcccgggcagtctacgtgcgc

SEQ ID NO: 251 - DNA, 849 bp, Unknown
  source: /note="Description of Unknown: MKP2_2161_1 Mutant Bacteria sequence"
ggccatggaagggtcgctggacgacatcacccgccgctttgagcgctcggtgctgacccagctctatcgcagctaccccagcacacgtaagctggcgaagcggctgggggtgtcgcataccgccatcgccaataaactgcgtgaatatggtctgagtcagaaaaagggcgacgaataatcccgccaggccggcgacccacgtcgccggcatcccggcctgcaaagcgggccaaacctgtatatactggttttttaatcctttttccggggtggtgcatcttggcgtcgcgtcgcgcgatcgggcactggctgatattgctgctgctctctgttctcttttcctcgctgctgttacgaatacacctgccggcagcgctgctgctggggccgctgatcgccggtctcattttgagcctgcgcggggtgaagttgagcatccctcgcccctgttatctggcggcgcaggccatcgtcggctgcatgatcgcccgggcgattaatccctctgtttttggcgtgctgttcaacaactgggcgctggtgctggcgatcctgttgaccaccctggcgataagcggccttaccggctggctgctggtccgctacagcgcgctgccgggcgccactggcgcctggggaagctctcccggcggcgcgtcggcaatggtggtgatggcccaggagtacggggccgatgtgcggctggtggcgctgatgcagtatctgcgggtgctgcgtgtcgtcggcgcagcggcgcgggtggctcgcgatggccggagcaatgaacctcaggagatggccgcggacatggtctggtttccctcgggggccccgggccgcccccgcccg

SEQ ID NO: 252 - DNA, 756 bp, Unknown
  source: /note="Description of Unknown: MKP2_2161_1 Mutant Bacteria sequence"
cgccccgcgcgcgccggcgttgtgcagcctggcgggcgcgggatccccctggccccccccgtgccctggcccgtcgcgcaggccacccccctttttcccggcggtggcgctaccggcgggcagcttcccgccctgctggccggtgagcaggggccggttgagaccgtcgaaacccgcgactggacgcggcaaaacctgcacgtccacgtggccgccagcggcgaacagtatcgcttcgttatgcccggcgcggcactggcggacgatgaattccgccgtctggaagagaaggttctgactatcgaacccggctctctgctggtggtcagcggcagcctgccgccaggtattagcgtcgataatctgatgcagctggtgaaaaatgcgcaacagcagggactgcgctgcatcattgacagttccggcgatgcgctggccgccgcgctggacgtcggcaatattgagctggtaaaaccgaaccagaaagagcttagcgccctcgtgcagcgcgatctcagccaacccgatgacgtgcgccttgccgctcagtcgttgatccagtccggtaaagtgcgccgggtggtggtctccctgggtccgcagggggcattaggcgtggacgccagcggcaccgcgcggggatcgccgctccccccgccaagccatactacccctctcacgctccccacgagcacggaggccgcgagccggcagggggcgggaccggcacaccccccaaccgcgtcgctccttgtg

SEQ ID NO: 253 - DNA, 740 bp, Unknown
  source: /note="Description of Unknown: MKP2_2161_1 Mutant Bacteria sequence"
accgcgcgcgttgccgtggaagcgggtatcgctgactactggttcaaatacgttggcctgaacggcgctatcgttggcatgaccaccttcggtgagtctgcgccggctgagcagctgttcgaggagtacggcttcaccgtcgataacgtggttgctaaagcgaaagcgctgctgtaaatccccaccgctatcgcccggcccgaagtcgggcgatacgctctctgagtaatgatcttccgatcatgagtttgtcttttcctttctgaaccatttcccactctattttgtgcgtgaccgctgatttctgtacgtttttttgtgcagaccggcaaatgtagaccagattcaataggcgcccgcacgatcgcgccgcgcccctcgattccgccggacgtctgtaaaggagaccccgccatgccgtcaccgatgatttatcaggatctcaccactgccgcgctgctcggccatgcagcgcagtatcacagcgagaccgagattgtctcggtgagtactggcggtgagaaggagcgcagctgctggggggaggtggccagccgtgctcagcggctggcatcggcgctggcgtcgctggggctgccgccgggcgcccgctgcgccacgctggcatggaacaaccgccgccatctgacgccgccgacgagcgaacgaggttaggggcggaggggggggtggatatgacatacgcacgagaaacacgagctagaggtaagcagcaaaag

SEQ ID NO: 254 - DNA, 685 bp, Unknown
  source: /note="Description of Unknown: MKP2_2161_1 Mutant Bacteria sequence"
gtgcgcgggtctgggtgcttagcggtgtactgttgagtggttgtgtgcaagaagaagacggcagacgtgttcctctctggtctcgtgggctcggagatgtgtagcagagacagcagcagcagcgccgccgtcgccagggcgagatggggcaccgccagcagcagcggcagacgggaagccagccgccgccagcgggccgaaggccagagggcggcgacgatggtcagggcgatcagcagcgcgccgccgacggacaacagcgtggagacgagcgtggcggccagcgcctggcccagctgcgggtcggcgaacagcgcccgccagtgggccggggagcgcgcagcgcccaccagttccccggcggcggggagcagcggcagatagatcgccgccatcgccccccaggccagcaggatcagtgggtaccgtagcggcgcagccattcctgctccagcgcgtcaacccatgccgcgtgaggctcggcaagcaccggcggcagatcctgcggcagggctgccgccagcgcctggcgctggccgtcaggcagacgctgcggatccagtacgctcggatcgccccagacggcggcatcggccttgcgcaattgcgcctcaggggagagcaggaaattggccactactttggcgccagcgacagcgcgggcgttagccgggatggtaacgaa

SEQ ID NO: 255 - DNA, 671 bp, Unknown
  source: /note="Description of Unknown: MKP2_2161_1 Mutant Bacteria sequence"
ggcctcaagttcagcggctacgcccgctatggcgcccacttccagaccggcgaccagaaatatgtcggcgtcgacggctcctataacggcgcctcggcgatcggccgtctgggcaacgaaagcaacggcggcgaattccagatcagcaaggccttcaaaagcgcgcagggggctatctgggatcttaacgtgatgttcgaccactggagcgacgaagttaacctgaagaaggcctacgtcggggtcaccaacgtgctggaatccaaccccaacgcctatatctgggccggccgcgacttccaccagcgtccgcaacaggggatcaacgactacttctggatgaaccacgacggccagggcgccggggtgaagaactttgatatcggcggcgtgcagttcgacgtggcggcggtctcgcaggtgaaatcctgtagtccggaagtgatggccgacgagaccaacccgtcgcgcatcacctgtaccggcagctccgacaccggcgacaacggccactacgcgctgaccaccaaaacccacaacatcaaggccgggccgatcgacgtcgaggtgtacgccaactacggctttgactcaaaggcggtggacagcgacgcgcgtctcgaagcctggcagggcgggctggtgctgagccacaccaacgacagcggggt

SEQ ID NO: 256 - DNA, 666 bp, Unknown
  source: /note="Description of Unknown: MKP2_2161_1 Mutant Bacteria sequence"
tctctatcatcgctgcatcaggcactggcggcgggatatttgcctcccattcctccagccacttcagcttgccgtcccattccggcagcggggccggcggcagcggcacgatatcgttgatttccgggacgacaggatgggcccatgagtatttcgccagcacagcacctatctgctcataacgacgggcacgctccgggtctttctccagtgccagatagaacaacctgtccattggttcaggtccggaaaatccgtgcatcaggaaaccggctgaggttgaatctcccgctgccacacccaactggaatgcctcagttgcctgctgaaatcgcttattatttttcaggttaacacccagatcactggatacctctctctctccctgttcagcagcacagcgacgcatctgacgggatatatccggcgcaatatcaatcggagcgagtttatcccccacatacgcctgcgcctggggattcccttcatctgccgccttacgatagtaacgcagcgccatctccgggtcctgcgccagtcctgccgcaccgtgctccagatagatggcaataaagtagtagccggcggccaccttcgcatcaatcagttgctgactcaggcgcagacgttcatggctgctcagcgcaaagcgcccgcgcagcgcgc

SEQ ID NO: 257 - DNA, 619 bp, Unknown; identical to SEQ ID NO: 108
  source: /note="Description of Unknown: MKP2_2161_1 Mutant Bacteria sequence"

SEQ ID NO: 258 - DNA, 610 bp, Unknown
  source: /note="Description of Unknown: MKP2_2161_1 Mutant Bacteria sequence"
ccgccgtggctctctttgtgtctcgctgcggttgctccgttcgcctgcttgtgtctgttttttttttttagtgacacgcccgggcgcgggaagtgaagtgtagagggggatgggagcgacagaggtgtataagggacatttccggttgtgccgtcatttcgccgggtggcggctgcgccttacccggcctacggggtctacaggcgatctttgcttcccaggcccggcaagcgctgcgccgccgggcaatctatcggcgccatacccgccatttcgccgggtggcggctgcgccttacccggcctacggggtatacaggcgatcttcgcttcccaggcccggcaagcgctgcgccgccgggcaatctatcggcgccgtacccgccatttcgccgggtggcggctgcgccttacccggcctaggggttcgtgcggcctgtcactcatttacccacttgcgcgactgaaactgccggtgctggcggcctcaaaatcgcctttctcttagccacatctgacgctgccgcggcgcaaccaagcgtcgaccgcgggggccggggggcgaccaaaaccaaaacgaccgactggcacagatatcctcactacacccg

SEQ ID NO: 259 - DNA, 609 bp, Unknown
  source: /note="Description of Unknown: MKP2_2161_1 Mutant Bacteria sequence"
atatgtcctgggcagacggcacgatggagctgccggatgatgaaacctatggcgggctgataaaaaaatgtgttcacctggtctccgggcatgagcagcgtctctgctttccgctggactcggtgcggcgggcaaacggcaaatacccgccctgtgccagagaggtggtttacccggggatgcactcggatattggtggaggatatccaccgggggatcaagggaaagcgaatggtaaagatgatgcattattgctgtcgcagattcctttgaacgatatatataccgctgcttttagcgcaggggctccattaaaagtaccacaggatacgctgccagagttttttaaaaatgatgcctggagaaaaatgccattagatttgttagatgcgttttttgttgatgaggctctggtcaaccgcttcaacgcctggcgcgaactcaccctgggccaaaccacgccgaaaacgttcgatcccgaagcagcctctcactacgaaccacctgccgccggcggcagtctggaaaccgtcattgctgagcagatggcctggatcaccgcctggcgcatcgaccgctatgccagaggctcgatgctgaaaacgccct

SEQ ID NO: 260 - DNA, 599 bp, Unknown
  source: /note="Description of Unknown: MKP2_2161_1 Mutant Bacteria sequence"
gcagcggcctgcccgtcgccgggttcagctgtttcgctttcgccagtttctctatcagcgctgcatcaggcactggcggcgggatatttgcctcccattcctccagccacttcagcttgccgtcccattccggcagcggggccggcggcagcggcacgatatcgttgatttccggaaccgtggggctggcgtaggaataattgctcaggatcttcgttatcagtttatagcgccgggcacgttccggatccttctgctgagccagataataaagttcatctgaagattcggggccatcaaacccatgacttaaagcaagcgctgaggaagtgtctccagccgccacacctaactggaaagcttcaattgctctccgataataaccttttccctgtaagttaacccccagcattaccgccgcctttccctctccctgttccgcggcgcaacgacgcatctggtgtgcaatatcgggcgccctgtccaccggcgccagcttatcccccacatatgcctgcgcctgcggattgccctcatccgccgccttgcggtaatagcgcagggcaagcgccggatcctgctgcagccccgcgacgccc

SEQ ID NO: 261 - DNA, 587 bp, Unknown
  source: /note="Description of Unknown: MKP2_2161_1 Mutant Bacteria sequence"
gagggcgcttaccactttgtgattcatgacgggggtgaagtcgtaacaaggtaaccgtaggggaacctgcggttggatcacctccttaccttaaagaacctgcctttgcagtgctcacacagattgtctgatgaaaatacagcagtaagaaacctctacaggcttgtagctcaggtggttagagcgcacccctgataagggtgaggtcggtggttcaagtccactcaggcctaccaaatttgcgaagcaaatttgaagaggttgcaaacgatggggctatagctcagctgggagagcgcctgctttgcacgcaggaggtctgcggttcgatcccgcatagctccaccatctttactgcgaacacaagaaaacttcagagtgaacctgaaaaggtgcactgcgaagttttgctctttaaaaatctggatcaagctgaaaattgaaacgacacacagttaatgtgtgttcgagtctctcaaattttcgcaatcagaagtgaaacatcttcgggttgtgaggttaagcgactaagcgtacacggtggatgccctggcagtcagaggcgatgaaggacgtgctaatctgcg

SEQ ID NO: 262 - DNA, 578 bp, Unknown
  source: /note="Description of Unknown: MKP2_2161_1 Mutant Bacteria sequence"
catatcgagcaggggccgtgcctggagcaggcggggctggcgctcggcgtggtggaggcgattaacggcgccagacggctgaactgccgttttaccggcgaagctggccatgccggcacggtgccgatgcttcatcgcaaggacgctctcgccgcggcggcggaatggatggggcaggtggaaaacctgacccgccagcgcggcggtaacctggtggcgacggtcggcaccctgcgctgtgcgccgggcgcggtaaacgtgataccgggcgaggtgcagttgacgctggatattcgcggcccgcaggatgcgccgctgacggcgctgctggaggaactgctggggcaggcgcaggcgattgccgggcgccgccggctgagtctcgccgccgcggggtattatacccacgccccgaacgacagcgagcatcccctgcgcgccgcggtgcacgaggcggggggggcggggggaggagggtagccgggcgacgcgggccggcggggcggagacagcggcgagcacgccgtaggcgcggacggcgcgccgcgaggtcgggacgggctcggttcggcgcggcg

SEQ ID NO: 263 - DNA, 521 bp, Unknown
  source: /note="Description of Unknown: MKP2_2161_1 Mutant Bacteria sequence"
gggtgggatccaggaaaccactcggcgtctccgcccccggcggacagacatccggtcccgcggccaacatgttgccgggtggcggctggcgccttacccggcctacaaaggccacccgcgatttggcgctctattcgcgcccttcgtaggcccgcgcaagcgtagcgccgccgggcaaggacagcgggcacggagccgattttgtgccgggtggcggctgcgccttacccggcctacaaaactcttctggtggcatgcccaggcccgcgcctgcgcagcgccgccgggcagttactgcgcctgctgctgcgcctgcgccagctggcggacgatcgcctcgcgccgcgcatccccttccggtagccgggccagcaacgcctgcagggccgccccggcctgtcctctatccccacatgccgctgcccgccagcgcaccaaggctctacccggtggcaccccgagcatgccaagcccaccaaagagcgcaccgcgacgctccgccactgacgtcgtgtagaaca

SEQ ID NO: 264 - DNA, 470 bp, Unknown
  source: /note="Description of Unknown: MKP2_2161_1 Mutant Bacteria sequence"
caacccccccccccttccccccccgctctactgctccgcgcgacatcgctccgggcgtgatgtcgcatgaccgtccgcctgctgccatctcttttcgtcactgtcacaggcccaccaccgggaacacacctggcgcgcgcgtctggagcgtcagaaggggatacgggacaggaaaaatcgccaggccgccggcaacggcttgccgcccaaaccggaagagcgctggcgctatattaaagagctggaaagccgccagcctggcgtccgcgcgccgaccgaaccgaccgccggtggcaaagtctttctcttatacccatctcctagcccacgagacgatagaggatctcgtctgccgtctgccgctgtaaaacatcaatcgactatcgtgcaggcggacgccagtggagctaccgcgtaccaggcactccgcaccccacacatggtgtctacggcgatcgcacgagggggcc

SEQ ID NO: 265 - DNA, 458 bp, Unknown
  source: /note="Description of Unknown: MKP2_2161_1 Mutant Bacteria sequence"
gtctgggcctgtatctgaaaaccagcgatattggccaggtgctgctctggcagcaggctgaacgacattttcctgcgctgttgcagcaggttaaggacccgacggcggcgccgctgcgaatggatgagctggcggagctgcggcttggcctgcgcagccacctgcaggatactccgaacgacctcgccggctggcagctgcttgggcggctgggcctgttgttaaacgatggcgagacggcgatcggcgcctttggccgggcgcatgctctggcggcggacgacccggcggcggctttcgattacgccagcgcgctggtgcgggcgggagatagcggtcaggttcggatgggcgagctgctgctgcgtgacctgcatcagcggcagccgaacagcctgccggtgctggagatgctggccctgggcggggggcgcaggggggccggtcggctcgtcccg

SEQ ID NO: 266 - DNA, 454 bp, Unknown
  source: /note="Description of Unknown: MKP2_2161_1 Mutant Bacteria sequence"
gggtgtggtggtgcggtgtgtgttgttttatgtttttgtgttgttttggtattgatgtacggtgtcgttagtatggagttttttttttcaagcagaagacggcatacgagatcctctctggtctcgtgggctcggagatggggataagagacaggagtacgcagaagtgttttccggcactgaggagtggaggcgatcaaggtggaggcgtcagatacttacgactggcaggaggattcgacctatattcgcttgtcgccgttctttgacgagatgggcgccgagccgctgccggcagacggtcccttatccacatctgaccctgccgccgcgcgagcagcgggcgacctcggggggctcggatccggtgaacaagaaaacccaagagatgaagacggctaagaggaacacggacaagaggcagaccatggaatgtctgccggcacgagcatga

SEQ ID NO: 267 - DNA, 453 bp, Unknown
  source: /note="Description of Unknown: MKP2_2161_1 Mutant Bacteria sequence"
cgtgtggtttgctggtcgcctccttctcgcgcatcctctcgtagcggctcgcggcagtaggatacagcaccgtcgtcatctatgtcattactgacgcccgcaccacctagctctcccccggatctctcgtctgctacgtccggtgtctactcgagcctaggggttcgtgcggcctgtcactcatttacccacttgcgcgactgaaactgccggtgctggcggcctcaaaatcgctgagacgttcccggaaggccggggcagcccgcatggatgcgggctgagggccgtggttagcagggaaggggcctcggcccgacccgcaggctgcagggataagtcgaagggggggcgcgtatacaaagcggacggagccgacgagcgagcgagtggtgagcgggggggggggcggagaggagagagagacgatggagcgacaggggcgtggccagaggg

SEQ ID NO: 268 - DNA, 439 bp, Unknown
  source: /note="Description of Unknown: MKP2_2161_1 Mutant Bacteria sequence"
ttaccactttgtgattcatgactggggtgaagtcgtaacaaggtaaccgtaggggaacctgcggttggatcacctccttaccttaaagaacctgcctttgtagtgctcacacagattgtctgatgaacgtaaagaagcaaggcgtcttgcgattgagacttcagtgtccccttcgtctagaggcccaggacaccgccctttcacggcggtaacaggggttcgaatcccctaggggacgccacttgctggttcgtgagtgaaagacgcgtgccgaactatctcaaaactcatcttcgggtgacgtttgagatatttgctctttaaaaatctggatcaagctgaaaattgaaacgacacacagttaatgtgtgttcgagtctctcaaattttcgcaatcagaagtgaaacatcttcgggttgtgaggttaagcgactaagc

SEQ ID NO: 269 - DNA, 439 bp, Unknown
  source: /note="Description of Unknown: MKP2_2161_1 Mutant Bacteria sequence"
tctctctcccgcctgctcctgccgtgcattctctctcttgatttttctctgacagattttgttgttgtttttgcaaacagaaggcggcataggggttcctctctggtcgcgtggttttggaaaggaggagaagagaaaggagtaccagaaaaaagacgactatgtttcaacacccggttctgattatctaaaaagatcaccataacgatctcgcgctcctcttccgtcagctggctttgtaaaaactcgcgcgtcatcgaggggggtgaccagcccggcctcctcgaccagctgcgagacctcgatcgtatccccatctgactctacccaagagcgagctatcgacaaccgcggcagacagcgtctcaaagaaaaaaaaaacacagagacgcaaaagacaaatcagaacgaaaggagggacgactacactagcagcggg

SEQ ID NO: 270 - DNA, 374 bp, Unknown
  source: /note="Description of Unknown: MKP2_2161_1 Mutant Bacteria sequence"
ccgggcaagccgaaactgacaggcatcaagctgtatgtctatggtttttcccgcggcgcggcagcggcgcgcacctttgtgcgctggctgagcgaactgctgccccctccggcggcggagggtgaaaaaccgccgcagtgcctgcagacaggcgggatgcagctgcccgtcagcgtggagtttctcgggctgctggatacggtggcctccgtcggggtggcgcatgtggtgccggttgccgacgggcatatgtcctgggcagacggcacgatggagctgccggatgatgaaacctatggcgggctgataaaaaaatgtgttcacctggtctccgggcatgagcagcgtctctgctttccgctggactcggtgcg

SEQ ID NO: 271 - DNA, 356 bp, Unknown; identical to SEQ ID NO: 116
  source: /note="Description of Unknown: MKP2_2161_1 Mutant Bacteria sequence"

SEQ ID NO: 272 - DNA, 351 bp, Unknown; identical to SEQ ID NO: 117
  source: /note="Description of Unknown: MKP2_2161_1 Mutant Bacteria sequence"

SEQ ID NO: 273 - DNA, 305 bp, Unknown
  source: /note="Description of Unknown: MKP2_2161_1 Mutant Bacteria sequence"
gattcatacagcggccagccatccgtcatccataccacgacctcaaaggccgacagcaggctcagaagacgctccagtgtggccagagtgcgttcaccgaagacgtgcgccacaaccgtcctccgtatcctgtcatacgcgtaaaacagccagcgctgacgtgatttagcaccgacgtagccccactgttcgtccatttcagcgcagacaatcacatcactgcccggttgtatgcgcgaggttaccgactgcggcctgagttttttaagtgacgtaaaaccgtgttgaggccaacgcccataatg

SEQ ID NO: 274 - DNA, 256 bp, Unknown; identical to SEQ ID NO: 120
  source: /note="Description of Unknown: MKP2_2161_1 Mutant Bacteria sequence"

SEQ ID NO: 275 - DNA, 254 bp, Unknown
  source: /note="Description of Unknown: MKP2_2161_1 Mutant Bacteria sequence"
accccgaacttactgaaccaggtcccggaaggatcatccacggttctgaaacggtaagtgatatgcgacaacccctcgccatcaaacgcaaatttcgcagactgaatccccattttcagcccgtcacttatcgccgggttttcacccggctgcaatggcttatacgccagctgtccctgcgttaccggcattggcaggggcgtgttatttatcgttctcatcagtccatcggtaccaatgacgccatattcccc

SEQ ID NO: 276 - DNA, 251 bp, Unknown
  source: /note="Description of Unknown: MKP2_2161_1 Mutant Bacteria sequence"
agccccactgttcgtccatttcagcgcagacaatcacatcactgcccggttgtatgcgcgaggttaccgactgcggcctgagttttttaagtgacgtaaaaccgtgttgaggccaacgcccataatgatgtagccccctgaaacaccggacagtagctgtatctccagataagagataggcttgaatatatgtctaacactaacgccaattttgagatgaccgggatcctgttagggcaagaagcccgtaa

SEQ ID NO: 277 - DNA, 251 bp, Unknown
  source: /note="Description of Unknown: MKP2_2161_1 Mutant Bacteria sequence"
cgctgccgatgcgttgtctgcggccctcaaccccggtcacttactgatgtaagctcccggggatgtcgggtcttgacgcctttttacaacgcgaaatgctggattaaatggggggcgcctttcacgctgccgatgcgttgtctgcggccctcaaccccggtcacttactgatgtaagctcccggggatgtcgggtcttgacgcctttttacaacgcgaaatgctggattaaatggggggcgcctttcacgc

SEQ ID NO: 278 - DNA, 236 bp, Unknown; identical to SEQ ID NO: 123
  source: /note="Description of Unknown: MKP2_2161_1 Mutant Bacteria sequence"

SEQ ID NO: 279 - DNA, 194 bp, Unknown
  source: /note="Description of Unknown: MKP2_2161_1 Mutant Bacteria sequence"
ggggccgccacgccggctgccagtagccgctttgcgggcagggctcaccgctgcggcactgcagccgcgccacgctgtccttctcaaagtccggtgacgtcggcagcggcctgcccgtcgccgggttcagctgtttcgctttcgccagtttctctatcagcgctgcatcaggcactggcggcgggatatttgcc

SEQ ID NO: 280 - DNA, 162 bp, Unknown
  source: /note="Description of Unknown: MKP2_2161_1 Mutant Bacteria sequence"
cgccacgctgtccttctcaaagtccggtgacgtcggcagcggcctgcccgtcgccgggttcagctgtttcgctttcgccagtttctctatcagcgctgcatcaggcactggcggcgggatatttgcctcccattcctccagccacttcagcttgccgtccca

SEQ ID NO: 281 - DNA, 134 bp, Unknown
  source: /note="Description of Unknown: MKP2_2161_1 Mutant Bacteria sequence"
aacccggcgacgggcaggccgctgccgacgtcaccggactttgagaaggacagcgtggcgcggctgcagtgccgcagcggtgagccctgcccgcaaagcggctactggcagccggcgtggcggccccgtgaagg

SEQ ID NO: 282 - DNA, 128 bp, Unknown; identical to SEQ ID NO: 126
  source: /note="Description of Unknown: MKP2_2161_1 Mutant Bacteria sequence"

SEQ ID NO: 283 - DNA, 5272966 bp, Klebsiella pneumoniae (residues 1-1,757,656 of 5,272,966)
  modified_base (3084)..(3118): a, c, t, g, unknown or other
  modified_base (28433)..(28436): a, c, t, g, unknown or other
  modified_base (118067)..(118310): a, c, t, g, unknown or other
  modified_base (118851)..(118896): a, c, t, g, unknown or other
  modified_base (120449)..(120449): a, c, t, g, unknown or other
  modified_base (194278)..(194326): a, c, t, g, unknown or other
  modified_base (584922)..(584993): a, c, t, g, unknown or other
  modified_base (711312)..(711341): a, c, t, g, unknown or other
  modified_base (715352)..(715400): a, c, t, g, unknown or other
  modified_base (765525)..(765701): a, c, t, g, unknown or other
  modified_base (812107)..(812110): a, c, t, g, unknown or other
  modified_base (812502)..(812502): a, c, t, g, unknown or other
  modified_base (857630)..(857672): a, c, t, g, unknown or other
  modified_base (858090)..(858182): a, c, t, g, unknown or other
  modified_base (858823)..(858981): a, c, t, g, unknown or other
  modified_base (862845)..(862958): a, c, t, g, unknown or other
  modified_base (865109)..(865146): a, c, t, g, unknown or other
  modified_base (865226)..(865388): a, c, t, g, unknown or other
  modified_base (866202)..(866559): a, c, t, g, unknown or other
  modified_base (866925)..(867036): a, c, t, g, unknown or other
  modified_base (867121)..(867426): a, c, t, g, unknown or other
  modified_base (867608)..(867654): a, c, t, g, unknown or other
  modified_base (870232)..(870256): a, c, t, g, unknown or other
  modified_base (871603)..(871702): a, c, t, g, unknown or other
  modified_base (915086)..(915090): a, c, t, g, unknown or other
  modified_base (1078260)..(1078399): a, c, t, g, unknown or other
  modified_base (1437186)..(1437315): a, c, t, g, unknown or other
  modified_base (1474838)..(1474960): a, c, t, g, unknown or other
  modified_base (1833250)..(1833311): a, c, t, g, unknown or other
  modified_base (1849808)..(1849884): a, c, t, g, unknown or other
  modified_base (2382722)..(2382724): a, c, t, g, unknown or other
  modified_base (2518065)..(2518120): a, c, t, g, unknown or other
  modified_base (2565196)..(2565222): a, c, t, g, unknown or other
  modified_base (2715478)..(2715507): a, c, t, g, unknown or other
  modified_base (2716052)..(2716069): a, c, t, g, unknown or other
  modified_base (2932552)..(2932675): a, c, t, g, unknown or other
  modified_base (2956671)..(2956674): a, c, t, g, unknown or other
  modified_base (3023549)..(3023584): a, c, t, g, unknown or other
  modified_base (3040821)..(3040950): a, c, t, g, unknown or other
  modified_base (3111775)..(3111801): a, c, t, g, unknown or other
  modified_base (3118418)..(3118422): a, c, t, g, unknown or other
  modified_base (3118876)..(3118876): a, c, t, g, unknown or other
  modified_base (3154319)..(3154319): a, c, t, g, unknown or other
  modified_base (3269529)..(3269710): a, c, t, g, unknown or other
  modified_base (3309401)..(3309441): a, c, t, g, unknown or other
  modified_base (3335149)..(3335152): a, c, t, g, unknown or other
  modified_base (3360871)..(3360879): a, c, t, g, unknown or other
  modified_base (3416473)..(3416532): a, c, t, g, unknown or other
  modified_base (3628287)..(3628377): a, c, t, g, unknown or other
  modified_base (3687336)..(3687340): a, c, t, g, unknown or other
  modified_base (3689484)..(3689493): a, c, t, g, unknown or other
  modified_base (3750363)..(3750397): a, c, t, g, unknown or other
  modified_base (3755060)..(3755177): a, c, t, g, unknown or other
  modified_base (3755667)..(3755794): a, c, t, g, unknown or other
  modified_base (3786881)..(3786881): a, c, t, g, unknown or other
  modified_base (3836150)..(3836159): a, c, t, g, unknown or other
  modified_base (3922163)..(3922163): a, c, t, g, unknown or other
  modified_base (4002041)..(4002090): a, c, t, g, unknown or other
  modified_base (4020308)..(4020355): a, c, t, g, unknown or other
  modified_base (4253670)..(4253671): a, c, t, g, unknown or other
  modified_base (4407247)..(4407287): a, c, t, g, unknown or other
  modified_base (4481789)..(4481888): a, c, t, g, unknown or other
  modified_base (4611337)..(4611453): a, c, t, g, unknown or other
  modified_base (4611987)..(4612023): a, c, t, g, unknown or other
  modified_base (4757534)..(4757557): a, c, t, g, unknown or other
  modified_base (4778509)..(4778557): a, c, t, g, unknown or other
  modified_base (4864858)..(4864950): a, c, t, g, unknown or other
  modified_base (4898019)..(4898074): a, c, t, g, unknown or other
  modified_base (4898178)..(4898240): a, c, t, g, unknown or other
  modified_base (4898624)..(4898864): a, c, t, g, unknown or other
  modified_base (4899005)..(4899060): a, c, t, g, unknown or other
  modified_base (4899122)..(4899164): a, c, t, g, unknown or other
  modified_base (4903024)..(4903183): a, c, t, g, unknown or other
  modified_base (5011684)..(5011702): a, c, t, g, unknown or other
  modified_base (5031234)..(5031344): a, c, t, g, unknown or other
  modified_base (5117782)..(5117974): a, c, t, g, unknown or other
  modified_base (5125879)..(5125958): a, c, t, g, unknown or other
  modified_base (5166378)..(5166504): a, c, t, g, unknown or other
  modified_base (5166581)..(5166581): a, c, t, g, unknown or other
  modified_base (5244451)..(5244518): a, c, t, g, unknown or other
  modified_base (5246908)..(5246931): a, c, t, g, unknown or other
ggcacagcccaataataatcgccgctttataggaaaaacgcttaatcagcgccgccgcgggcagggcgacaaaaaagtagccgaggaaaaaaatcgactgcaccagcgctgtctgggtatccgttaaatcgaagccctttttaaactgggcgatcaaaatatcattcaggttgcccgccatcccccatagcgcaaacaggcaacagacaagtaaaaattgcagccagggggtatggggtaaatacgcactggtgtccagtttttstttttggaccgctgcgttatcgaccttatccgtgattagcgtactcattgagctatcctcttaatgttttttatacagtagggtttatgccatttcataatcagcggcggcacggagaagccgttcctgtgcctccaggtactcaggtaaagatgaggcgccttgtttttcgacactgacggcggcataggccgccgcgaatcgggctgcggcctgtagcggttccccgcaggccagccgcgccgccagcgcgccgttgaaggcatcgcccgcaccggtggtgtcgcgggggtgagaaggaaagcagggaataggggatttcaccccatgctcgctcagcagggcgccgctggcgccgagagtgataatgacgttgcgcgcgccctgagcatgcaacacgtcggcggcctcagccgcggccgccagactgtcaacccggcgtccggtcattaacccggcctccgtggcgttcggtgtaagtaaatccactttgctaagaagggcgcgctcaacgggctgccagggcgcgggattgagcatcaccagggccccggcttgtttgccggcgtctacgacctgttcaatggcggaaagattgttctccagctgaaccagaaccacatccgcgcagccgatagcgggaatgcagccggcgatttcatcatcggtcaccgtcatattcgcgccgggatcgacggcaatcatgttttcggcatcgttaccggcgacataaatcagcgcattgccggtggggatctcttcggcgaccagcagcgtcacagcattgaagcccacgcctttcagatgacggcgggcaaaatggccgaaggtgtcattgccaatcttgccgatatagtggacatttgctcccgcttttagcgcggcggtggcctggttcgcccctttacctccggcgctggtcatacttccgcaggccactaacgactcacctggtaccggaaagcgatccaccctggcgaccatgtcgaaattgaatgaaccaaaaacacagacttttcctgacatcattcgctcctctataccagctcgggggagtgcagcgcggcggacagttcgcgggacatggtttcccaggccagctcgagcggcatatcagcgcggaataaaccgctgctgcccatcactaatatctgtgcgccggcgcccagcagcgcgcggtaggtgttgcggttacaggagccatcgacttccagcaagaagcggaggctgccggtctctttgagctgatgaagctgcgtaattttggcgagcatttcaggaataaacggctgaccggcatagcctgggtcgacggtcatcaccgtcaccttatcgagcagatgcagatagtgctggatgctctcaaccggtgtggcgggattgagcaccattcccacctctttccccgcctgacgaagcatattgataacccggaacgcttcgcggcagatggtctccggatgcagtgagaaggcgtctgcgccggcgtctaacagcgccggtataaacgaagcgggcgcttcgaccatcagatggacatcgataggaagcgaggtgtagggacggatctgcgccacaaagctggccgacaacgccagatttttgacatagtggccgtccatgatgtcgacatgcagcctgtcggctttgctgtttagaaagcgcagctgttccgtcagcttcatcatgtccatacacatcagcgagggagaaaggtaataacgcataaggcctcatttattccggtggtggctgaattcaggcaaagtctggccctgccgcggtaagcagcgtttcgacattgcgcgtattaaccgtcacgtcatgacggcgtactcaggcgatttgcaggctgacgttatgccaggtcatctctttttccagcagcggatcgacaaacctttcagtcaccagacagtccagctcgcccagtccgccgatacgcgcgacgcctgttcgccccagcttgctgccgtcgaccaaagccacagtctgacgggcggccagcagcatctgtttcagcagggcggcgtgggcttgcgtacccgcatacaagccgctatcgcgctccagcccctggcaggagaaaaagagcgtatcaatggcatattcgcgtagcgttcgtgaggcggtttccccgaagaacgactcttcggtcggggagaaatcgccccccagcccgacgagatgcaacgagcgtcggctcatcagagtttgtaagatgcgaatggagggcgtaatcaccgtcaacgccatctccggcatctgccgggccaaaaaccagctggtgctactcccgtccaggacaatggtctgtcccggttggagaaactgcagtgctttacgggccacgcgcattttgccttcgctgtgcagcagcgttctgtgctgaaagcttccctggctatcttcaactggcagggcggatgccgccgcccgggtcgccggcagcggattttccgccgccagcgctccaccgtggcttcgggttaagatccctttgcgttccagctcgctcagatcgcggcgaatcgtttccctggagacccgagtcgcttgcgcaatctcattcacccgcatgacgccgtgttggcccagcagttcaacaatcaaatgatgacgttccagcggcaacatagctctctcctgaagtacataatcagattacctttcccttgcgcagagcgttgagacctcgggaatgtcccacgaaggcaagctatccgcagccgaacactgtgatagcgcacgcatttcgcttcacttccgtcagcggtttgcgctatttcgcccgtgattcaggcataaacaaaaacaannnnnnnnnnnnnnnnnnnnnnnnnnnnnnnnnnntatgcccgattacgcctgctctgcaaggttaacgcttatttcctgctgctaattaaaaacaaatgaaaataaaaaaatgctaatttgatcacgttattttcatttaatgcgtttttaaatgtatttaagccaaatatcagcattaaatgaaagcaattaaaaacaaaggacaggataagaccatgaatgaaacaacccgtcgttttgcacgtttagttgatctgagcgcagttcaggccaccagtaccgaagcggatgttcgcgcctgcgccgagctggctgccagatacaacattatttccgtccacgtactgccttgctggacgcgctttctcagtacgttgctgccgcagcagggtacgggagaggtgatgattggcggtccggtcggctttcccggcggtgggcataccaccgataccaaggttcaggaagtgcggcagctgattgccgacggcgctcgggaagtggatatggtcgtgaatatcggcaaagtgctctccggcgattatgactatgtgcgcgaagatttgcgccgcgtggtggaagccgccgccccggtaccggccaaagtgatccttgaaacgcactatcttaatgaggagcagattcgtcgcgtgtgcgaaattgccgtagaggtggggatgaagtgggtcaaaacctctaccggctgggcgcccaccggcgccacggtggaaaaagtcagcatcatcgccgaccagcttaaaggccgaatcgatatcaaaggcgccgggggcattcgcgatctggccacggtgcgtgcgctgtaccagcttggcgtgcgccgctttggcatgagccatggcgcggtaaccaaggtgctggctgaactggagcagcacccggaacgttttcccgagctgaacgccgattaaactgagagaccgcgggcctggtggcccgccttaagacgtcaccggagttagtgatgaaagataaaatactcacgattgatgttggcactggcagtacccgcgccgctattgtgcgcattgacggcgcgatgatcggctttgcgcaaagagagtatgagcaaaccacgccgcgtgcaggttggtcagaacaggccccgtctttatggtggcaggccgcctgcgactgtatacgcgaggtgctttaccgctatcctgaaacggcagcgcaaattgcggttattggtgcttgcggacagatgcatggcaccgtccttctggacgaccgtggcgagctggtggaggatagggcgttgctgtggaatgataagcgcagccagccgcaagttgacgcctttaacgcgcgcgaaggttgggaaaagtggctggcgcatttgaataatccgcctgcggcagcatggcccgctttcaagttagcctggtggcgcgaaaatcatccggatcgctggtcgcagctcgccaaagtattaatgccgaaggactatattaatttcatgctgaccggtgccatggcgaccgattatagcgaagcgtcgtgctatttcctgatggacagcgaaacccgtagctggtcttcgcaagcctgcgaaacgtttggtctgcgggtcgatcagctcccggagcttaaactttccagcgacataatcggccaggtgacgcagcgcgcagccgacctgacgggcctgccggcgggtatcccggtggttgccgggacgtcggatatggcggcctctctgctgggctcgggtgtgtatgaaccggggatggcgtctgattcaaccggcacgtcgacgctgatgacggtggtgtcgccgcggccgttacaccatccgctggttaataatcttcatcttgccaacgcggcctggggcggatttacgatcctcgacgccggcggcgatgccgttcgctgggcgcggctggcacttgccgataaccagattacgcatccacagcttttacaggaagcggcggcggtgccggcgggggcagaagggctgctgtttcttccctatctgacgggagaacgtctggccgaacacacgaactcgcgggcacagttttttggcctgcagcgcaagcatcgccgcggtcatttattccgcgcagttctggaaggggtggcctttgcatcctggcgcaatcttcggcagctgcagaagtgcgggcagtatccgcaacaaatgatcgcttccggcggcggcgcgcgcagctcgctgtggcttgaaatcaaagccgcggcgtacaatctgccgatattatctacgcgtaatcaggagaatggcgtcaccggatgcggtattatcgccggggttggcgtagggttgtacgccgattttgccagcggcgtgcggcaaacggtgcagttcgacaaagtgatctcaccggatccccgtctgcgggattattaccacgcctgcagcgagctttttgatacgctgtaccggcaatccgccgccttatacgacaggctggatgcgctcagcgtggggcccgactgatacgcaaaggtaagccgtaacgtgccgtaaaaaagagagaggcagaatgtttgcagaagaaagacaggagaagttactcggtattctcagggaaaaacgcaaagttgctgtttctgagatgtgtgacgtctttaatgtatcgggcgccaccattcgtgccgatctccgccagctggaagaggaggggctgctgacccgaacccacggcggagccgttcttcgtacccgggcaagctttgaacaggcgtcggacgatcgcgaaattgtcaatctcagcgcgaaagagcggatcggccagcgcgcggcggcgctggttgaggatggcgatataatcgtgctggataccggtaccacgacgctacatatcgcgcgcaatattcgtgacagacagaacgtcacggtggttaccaatgattaccaaatcgcccgggagcttgaggccagtccctcgattcaaacgattctgctcggggggatcgttaagaagggataccactgcgtggtggcgatcaacggacgttccattctcgacacgctaaacgtcgataaagcatttatgggcaccaattcgctgtcgctgaaacacggcgcctgcgtggccgatatcatgctggcagaaacgaaacgaggcatggtggaacacgccagtcaggtaattattgtctgtgactacagcaagctgaataacacctcgcttgcccaatttaccgccgcagatcgaattgacacggtggtggtggatcgtctgcctgatgatgttcaggcgtatcgtaatgccggcattcaggtgatttctctggatgaagagaatcttctctagcgcgaagttcaggcggtatcaaatatcaggtgggccgtaaaaccccgcccagatggacggggatgtaaggcgcgttttaccgagtcacgtgaagaggagcgatacagaggagtggatgcgatatgtgacgtagattccctcattcggcaatttaacataatatacattatgcgcactcatgttgtagaggctcaatgctaatgtctatttgtggctcataggaatgtccaggctatagttctcagacctgtatgtctagacaacgactcacttttcctgatgaggagttttctatggctatacatgacgccgggatgttcaacgtgaaagaaatcaaccgcctcaaaatccttcaggatgtcatcgatcgcaatctgcgtcctggccaagctgcggagatgctcggcattacaccacgtcattgcagccgactgctgaaacgctatcgtcaactcggaccgcttggcatgaacaaccagagtcgtggccgcactggtaaccgtctgttgccagcgtcactgacagatcaggctctcagtataatcagggagcaataccgtgattttggccccacgctggcgcgggaaaaactggaggaagttcacggtctggtccttggcaaagaaagcatccgacgtctcatgataaaagccggactctggatcccacgcagacagcgcgcacctaaaattcatcagcctcgttaccggcggccttgtactggcgagctgatacaaattgatggctgtgaccaccactggtttgaaaaccggggtcgaccctgtatcagtttgccagggccatgcgctccctcaatatcacaccgctgtgcgcagaaaccagtcaggcaaaaggccgtgtggaacgtgctcatctaacccttcaggaccggctggttaaggaactcaggcttaggggaatctgtactatagaagcggccaatggatttgcagaagaatacattgcggattacaaccgacgctttgccaaagcgcccttgcatgattttaacgcgcaccggccactggcactagacgatgaccttgatgcggaatttacttggcgagagccccggcgtgtatcaaaaagtctgactgtacaatacgataaaatcctctatctgattgaggacagcgaatacagtcgaagagccatcggcaagtacattgatgtctggcattatcctgacggacataaggagctgcgactaaatggcgtgctgctgccctactccacctatgaccagctttctgaggttgagaccgtcgccattgtagataacaagagacttggccatgtgttggatgttgcccgtcagatccagagaaaacgggaaaataatcgctcacaatcgttaccttgttctggtgatgagccttcccgcagacggcacgcccctagcatcaacaaatctcagcgctcactgaacgaagatgacctacttgaagccatgataaagcttcagggaagctctgaagccatctttggtaaaaggtgaacttggcggaaacctcgtactaactgaccaacggcgatgtgtgcgctatctttcggctatagcaatcaaagccagagaagatttctgagaaatgcaaataacttcaatgatattatataaccgaggtaaaattcgagtgtcacagaaccccgaaccccgaaccgctccgcggcgatttactactccagcatctcacatcctaaaggctaaagtatggacttctctgaatatcagacagaaataattgaagatatcaaatcatgtcttgaaggtttacaggtacagccaattctctttatgggtgcaggggtatctcaacgctacttgaaagctcctgattgggaaaacctgttaaagtatctcgctgaaacttgcccattaatcactcgcccgtatggttactacagtcaaacaagaaatgacaataaaccattgatagcaagtgatttttctgagtcatacgctgagtgggcttgggatgtggggacatctcgttatcctgaacagtatttcaatggaaaaagctctaaagatatttatatcaagcatgagattgcaacattgttgaataacctttcagactcggttgatttttcagcaatgaagtacactgaagaaattgaaaagttaaaaaaagtaaggccccatgccattattacaacaaactatgacgatctgcttgaaaagatatttgataactaccaaccgatagttggccataatgttgtgactgttaactatactacatacggtgaaatcatgaagattcacggcagtagtaaagaaccagaaagcatcattataacaaatgaagattatgttgagttttataagcgtaaaaagtatatcagtgcaaaacttttaacatatttcgtcgagcatccgttgttcttcattggctatagtattaatgatgagaatattaaagccatcctgtctgatattgatgagataattgcgccgaataacgctttgattccgaatatttatttggtttcctttagtccagaatgtgaaggtacaggttcacaccagaaagagattttgattggtgttggtgaaaataaaagcatccgaatcaaagtgatctatgccaatgatttcggttggatttatgatgccctatcgtcaaatacgccagaaatcagtgttaacccaaaattagtcagggcgctattagccagaacctatacatttgcctctcaatctcttgtaaaacaagagcttccatatgattttgaaatgcttaagaacattgctgagcaagataacgtgttagcgaaactttatggaattgcagagttaaataatgggcaagcacttaacgcaagctatccctacaccatatctgaacttgcaaaattacttgatatgggatcttggcattacgtccataaagtattagaaagaatacacaaggaaactggttttaatattaaatcctcagataataactatcatgtgctagtgaaaacggggaaggaaggtgttcataaatattcccccgctgcattcgagttaatcaaaaaaatcattaatggtcagaagtataaactcaaaccataattggttcgcataatgacgttatgctaaagaggccgctgcgggagggattttcgcagcggccttttcaacatatggacatttctaatgagccagtgattagacattttcactgagctttgacacatgttgtagtagctaacttgagatgtccgtctctgaccaaatagacatgtccgcgctacagtctcaccacagcgatcactgctttcaaagatagtttcccaatcaaaggattctgatgacggatcatgcaccggcatttttactttggatgaagttaaccgactctaaatcattcatgacgttgtcgaccagcgtctgaccactcagatggccgcgcagcgcctgggtattcccgatcgccagtgccgacgccttctctagcgttacaatcaatcaggcccactgagtatgcctaaccgccgtcgtggataacccagcaataaccagctgcctgatggtcttgcccggtacgcactcaatattatccgcgaacgctataccgactttgggcctaggctggcgtatgagaatgttgtctacttgtgaaaaaactcataacaccattcaatggcgcatgctggttcccttcataccagtgcaataccctgtcacatacataattgctggcaataaaagaaggaacaccgaatgaagtatgtgaatctgggtcgtagcgggttgaaagtctcccgtctttgtctcggttgtatgagttatggcgaacctgaacgtttgcctcaaccctggtccctggatgaaaaggcgtcacgaccgctcattcgtcaggcgcttgaagccggcattaatttttttgacaccgcgaatatctactcgggcggtagttcagaagaaattacaggaaaagcgctgagagagatggccagacgcgacgagatcgttgtagcgacaaagaccttctttccgtggcgcaactcacccaataccgggtttctttcccgcaaggccatttttcagtctattgacgatagcctgatgcgcttaggcatggattatgtggatctctttcagattcatcgctttgactactccacgcctgttgaagagaccatggaggctctgcatgacgtcgttaaagcaggaaaagcgcgttatatcggcgcatcttctatggaagcctggcgctttgcaaaaatgcagcataccgctgagcgtaacggttggacccgatttatcacgatgcaaccgcaatacaacctgctttaccgggaagaagagcgcgagatgctgcccctgtgtgaagaccagggcgttggggtgatcccctggagtccgatggcacgcggcaggctcacgcgcgactggagtgtcacgtcccgacgaacgcaaaacgatgcctttgcgttaaaaatgtatgagaacgcagcccttctggataagcccgtgattgatgttgttgccagcattgccgaaaagcacgcggtgccaagagctcatgttgcaattgcctggctgttatcaaaatccgtcatcacagcaccgatcattggcgcaacgaaaccagaacatctttccacggctatcagcgtgctggacttttcacttagcgatgccgaaatcacggaactggaagctcgctatctgccgcaccccgttgacgggatcattcccccgcttccggatacgccgccttccctcacgccgccttcagcgatccagaactattaacaccctgtcctggcccggcgttgccgggtctcccagaccactcattcccggtcactgatgtgaaaagggaaacggtgccggcgcgaatgcgcccgatcgaaaaatcatcgctccaccaggttcggtcccgctgttagcgacaataaacaactcgcgatgcccggggcggatcgccaggcttgtcgatttaaggttacggcctttgtcgcggtcaggcagcacaatttgcccaataggcagtccgttgtggttgaagaccatgacgcggccctggcctgagatggccacatatacattgccttcgctgtcgacacgggccccgtctggcgccggcccggtgaactgataggtaacaactgaaccaaacggggcgaccgtggtggcgtctgacagtcttacgcgatgaagcctgtttttagcgtgttctgtggcccatatctgagagccggcggggtcaatcgctatgccgttcccgaccgcgagtccaggcaggatggcatgaattgacccgacattgggactaacgtagaacaccccaccctgtggatcggctgaatttccccggctgtcagtgaaataaaatccgccctgattatcaaagaccagatcgttgacaagaaatccagtatcaggggcaacaatcatctgctcacgggtgccgttgggttcgataacccgaacagaacctcgctgcatatcgcccaccgaggcgataaagatccgtccatctttgtgtaccgccaggccggaagcaccgaatgaattctccttaaggacaatggaaagctgccgctccggggttagcttaaacacgcgccccgtcgccacatcaacaaacagcaggttattgttccgatcgaacacgatcccttcgagcacgagcgacgcctgtgaaacgttgaagtacggctgggcctccacggtctgaagagaacgctcccagggcggtatggggacggcactgcatgtaagcgcgttatgatttagtccattcatgtggtttatccccggcaataatacagagggagacttcacctgcagtctccctgtgacagcaggtattaacttttatcaaactgactttcggtaaacggatcggcgcggccgccctgcaatgggattttggcaagcgccgcatcgatttcgcgtagctcactgtccgtcaaccggacttgcggtgcgccgctgttttctatcaggtgcggatattgcgtcgtacccgggatagggacaatccagggccgctgcgccatcacccaggccagcgcgaactgaaccggagtggtgtttttgcgacgggcccacgactgcgcaaattcaagcagcaccatgtttttggccagggcatcgggctggaagcgtggcaggttatgccgccgatcggtgctgtcgaaccgctggcttggattgactgctccggcaaggaagctgcgggcagtcgggcagtaaggtacgaaaccgatacccagctcttcgagcgttggaaatatccgcgtctccggttcccgccaccacatggcatactcactctgcaccgcagtcacagggagtaccgcatgtgcgcggcgaattgtcctggcactcgcttccgacagtccccagtgtttcactttaccctcctggatcaacgccttcacggtttccgccacatcctcgatcggcacattcggatcggggcgatgctgatagagaagatcgatgtggtccgttttcagacgctttagcgagccttctacggcgcggcggatatggtcaggatggctgttaagggaagtgggcttcccctcctccacgccgaaaccgaacttggtggcaatcaccacacgatcgcgaacaggggccagtgcttccccgacaaattcttcactgagatgggggccgtagacctcggcagtatcaaagaacgtgataccttgttcgaaggctgcccggataagcgaaaccatggctttacgatcgcgcggacctccgccgtaataacccaccatcggcaggcacccgagtcccatgctggacacctccagcgagccgagtttacgcgtggttaaggtttccttccggacgggagcagcatccgaaggggcgttcggcgtgtcctgaccagccggtttcgccatcacggcgccgctcctgccaagggtggttgcggccaacgccagaccggcgccggcgatcagaaaattgcgccggtcccgggaagcgggtacggcagcagaaggctggtcatgcatcatcttgctcataaactggaactccctataacgaagaaaggattcattaattggtcattaccaggcataagcctggggcgcttctcccccggggccgggccagatttcgtcgagacagctcatggtgtcgtctgatagcgtgactgtcgttgcgtgaagcgcctgctggagttgttcgaccgtacgaggcccaatcagtggagcggtaacgacaggattctgcaggagccacgccagggccacatcggagggggtttcgccgaggtcctcacataatccttcataggcttccagctgcggacgatactgttcgattagacgggcaaacgcgggcctggcacggcgcccgcttgccatctttttcagtacgccgccaagcagccctccggcaagcgggctccaggggatcaaccccaggccaaaatggcggcatgcgggaatgacctccagctcaatggtgcgggctgtcagattataaagactttgctcggcgaccaggcccaggaaatgacgggccgtggcgactgactgcgcagtcgcaatgtcccagcctgcgaaattgctgctaccgatataaagaacctttccctgctgaacaagcagttccatggcctgccagatctcttcccacggcgtatgacgatcgatgtgatgcatctgatagacgtcaatatggtcggtcttaagccgtcgcaaactgtcctcgcaggctttgcgaatatgatacgcagaaagccggcgatcgttcgggcccggtcctataggctgatagacttttgtcgccagaacgatgcgttcacggcggccaccctgctgaagccagcgaccaataatttcctcggacagccccgagccttgctggatatcgggagattgttcagtgccatacacgtctgctgtatcaatgaaattgatacccgcctcaagcgcctcatccagaatgcgggcgctggtcttctcgtcggtgacgtcaccaaaattcatggttccgagacaaaggcggctgactttcaggccggtgcggccaagatgcgtatagttcataaacggctccgttagatgagtgttccgccctggcctaccagccagagcgcatgattttcaagaataacgaagcacaacgtgtacagtgagtggacgtgcatgaatggacttgtgaaaaaaattcagcaatggattagccctaatcggtctaaggtgtatatcatttcttcatcaacgcattcgggttttaacgccgcataaggaaaactattctgtatgcaaataagcagagctgatgttgccgatcttatttatttcatggcgattgcacgtcatcgcagcttcagccgtgcggcaattgaattaggcgtcagtgcatcagcgctgagtcatgccctgaagggactggaaacccggctcggagttcgcctgcttaatcgcacgaccaagagcgtcacccctacggcagctggtgaggaactggttcagtctgttcttcagcctttcgacaccatagaaggcgcgcttgaatcgcttaaccggtatcgcaatacccctaccggacgtatccgcatcaatgcagccgttgaagcggcaaatcttttgcttgcgccggtcatgcccgcttttatggatcgctatcccgatattgaaatcgatattgtggccagcaaccgtatggttgacgtgactgatgcgggcttcgatgccggcatccgctatggtggcaccgtcccggaggacatggttgcccggcgtttatctgccgatattcgctgggttatcgcagcctcccctgattacctggaacgctacggaacgcctgaacatccggatgatttattacaccatcgctgcatcagcaatcgtctcggtgacgatcgggtttatcgctgggaacttgcgcgagacggcgaaacataccaaatgacagtgccaggctcagtgacggtcaatcatgccgaaacgggtctggtggccgtattgggcggggctggcctgatgtattttccggagcctcttgttgcaccctatgtcaaggatggacggctccgtctggtgcttacggaatggtccccactagaggaaggttttcatatctattattcaagccgccggcaattgccgaccgggcttcgccttctgattgagttcatacaggaggtcaggccgctggggttgtgaaatagtgcctccatactgaacgatgcgttatcggctttatcgccccgtcgcttattcagaatgctcagttgcaggaagccgcagggagtctgcaaggcgtgctgtttgctaataatggagaaacaagaggtaacgctgtgaaaaattacaaaaaaaacatgggttgtagtttatttgaaggctagcccaggtgacccgcatcaataagcgccatacgaagatgtttctgaatgaaatccgctttataaatgctgtatcggtggctgtcattttcacataataacatcgcgctttttttcattaaagcgtactgaatggctacgtcattgtgtttaataaggtaatcacggaatgccaggtgttttatgatttgagcatccccggtggtaaacgcatggatatgatgactacgctgacttccaccttttgtaaagtacctacgatttaaaatgccgttttcaccacgcacagtatatcctacaccctccattgcctgattcaaactgtccagttcttcaagattagcaacttcgattaatatatctattactggcttagctgataatccaggcaccgaggtgctaccaatatgatgaatccgggatatcactttaccaagcgtcatctgcaacagagtacgttcgttctcaaataaagtcggccacatttcatcataatcaactacagtcaatattcgcatgttcaacagtcacaccttttaaggaaatttaagcagtcacaataacataaatcgcctctgctgacttgaaggcatttataatctgtatctgtcctcataattttcaaccatcgtctgacaagatgccctaaacccctttgtagtgctctttattcagaccatacttcttcattctgagataaagttttttacgcggtatcagcagatactccgccacctcattaatacgtccctggtggatattcagcgcttcggtgatgatctgccgttcgacgtcctcaacccgctgatccagcggcgtcggctcgccaatgtgcatcagcggattaaccgtttctgcgagtggtaatacccctactgcaaacagctcggcggcgttcgccagttcgcgaacgttatttggccacacccggcgcatcatccccttcaacagaccagcatccacctccgggacgggatgattcagccgttgacaggttttttgcaaatagtgatgaaacagcggctcgatatcatcaggtcgctttgacagaggctggcagccaatttgcgtcatcgcgaagcagtaatagagttccgccactatctggctgctggcggctaactccaccagcgaagcgctaccgataccaatcaggcgaaaaggccgcttctcatgactctgcagctgtaccagctgatgctgttgctcgtgagtcagatgctcggggtgacttaagaccagcgtcccgccctgggcgtgggcgatcagttcattaagcgtatgggtgttagccggagtcagctcgcaggcgataaacggaccttcagcgtgccgtcctaactggtgcaggtaacgcgcgccggtcatgcggccggttcccggctcgccgtaaagccataccgcaatatccgtttctgccagctgctgaaggcgctggcgataccgaaccgtccattggctgcggccaataagctcaacctgtaatttttgctgacaatactggcgacgggcgataaccgattgcctctgacgcagcgcggcgtccaccagcgtgagcagcttgcccggatcgatcggcttttgcaggaaatcccaggccccttttttcaccgcctccaccgccatcggcacatcgccgtgaccggtgataagcagaatcggcagcagatcgtcatcctgatgaaacaacgtcattaaatcgataccggagcagccgggcatgcagacatcgcttaaaacgatgccgggccagtccttcggcacctgctcccgcgcatcaaacggattattacaggcactgacatgataccccgcttgctcaagcagctgcgtataggcatccagcacatcggcatcatcgtcaatcagcagaatcgaacagttattactcaacatcttttacatccgtcaaattgaattccagcaccacgcaggcactgcgtgtaaacgtcgacgccaggcgcaacgccccttccatttgcgtcatcagcgaaacacatatcgaaagccctattccgagccccacggttttactggtagtgaacggctttaacagcgaagggagtaaggccgcaggccagccagggccgttatcggcaatcaacacgcacagccttccgccctggatttgccagctcacggtgatttgcgcggcgtgcgggcaggcgtcgagggcattggacagcacgttcaccagcacctgatggacgcgcacttcgtcccccaggatccagacagtgtcatccggtatcaccagcgtcccctgctgaggcttatgacgcatcgccagcagttcccacgccacggtaaacgtctgacgcaaatcgaccggatgcagcggcgtttccagttctgcgcggcgggtaaactggcgcagggagcggataatcgcgtcaatgcggttgatcagcccttctgctttgcttaacgtcgtccgcgcctgctccgcctgtccctgttcgatcgcccttcccgccgtaaaaagatacatcgacagcgcgttcagcggctgattaatctcatgcgccagggtggtcatcgtctgccccaccaccgccagtttagcggtctggatcagctcgtcctgcgtggcgcgcagatcggcctcaatcgcttttcgctcgccaatctcctgttccagctgctgtttttgcgcattaagctgacccagggtatgacgaagcaaaccggcaatacgtcccagctcgtcgcgcccgtaaaccggaatggtcgcctcggtccggcccagaccaatctgcaccaccgcctgattcagcgcggtaaagcgtttcaccagccgcgagcgaataaaataatggtttagcccccatgccagcagcagcgccagcaaggtcgccaccaggattaacccgccgctgacccggacaatctgcgccatacgctgattaaacatctgcatctgctggtgactgctgccaagctgggcttccagcagcgttctgaagcgccccagcgtcgcttctctggaccggctggcttccacgagcgctttttgcgcgctaacatagtcgcgcatggtatccggcatattatttttcaccatgccaatttccagcagctcatcaatcgtttgtcgcagggtaatggtgctcggccagtcatccagcgcacggatattttcatccgccgtttttttcaggttttcaagatagcggatatgcgtctccaccagcatgccgtcatcattcccggatttcagttcattgagcctgtcgcgcaggtcgtcaacgatctgattttcaatacgagccagggtatagacctgctgctgttcattctgcacttcccgggcgcgtttcagatactgcctcgcatccccctgtcgggcttcaatctgatcgagcagcgttccctgttgccaggtaaaatcctgcaccagcgaattcagctcggtggtgaaatcatcgtgcagccagtcgatccgcgccgcaagctctcccaccttttcacgaaccagaaacatgttgtagagcacgcgatccagttccgccagcagcgcgcggctgtcctgcaatatcacccccaactgctggcgttctgccggcgacaacccctgacttagccgttctattttgtccagatgctggataatctggttgcgcagctgcagtcgtaccgtggtatttggcgccagcagaaattcattgagctgatcgaccaccaggttgagattcccttcaatcagaaaagccgcatggatgcgcggaaaatactcatccagcgaatagcggatctgcgaactttgttcatgccaggaatagaggcttacgctgctgacaatcagcgtaagcagcgcccccgtcagaaatgccccgcgcagactgctactgatactgatttgccgcaggcgttgcagcatggacctgtccgtcatttcagttcttccagtttagtaatcgcctgccgctggttgttgagaaaccagagctgccactccatcatctgctgttccgcaaaacttttgttgtcgaactgagccagccaggcttcatcctcgctgctggccggatccaccgggacacgggtgagcagcgcccgtatctcgggcagcggacgcttaagacggacctccgcgctatgcagcgctcgccaggcgtctttgagctgggcaagacgaaagctaatcgccgtatcaaacatccgctgaaccaaacgctgacgtttgaggatcaatcgatagtttaatggcggttgattcatcagcatcgcctgctgcgccgcccgtggattgcctggcgccagcggtgttaccggatacttcccggtattagcgtcggcgaggatcgtctggccctccggacttaacagatagcgaataaaccgccgcgcttcgctggcgtgctggctgtttttaagcactgcgacataggtcggcgaaaccgccgactgagggaaataggtaaaagccaggtgcggatcgttcagtagcagattggcgtaattatcaatcaccggaccagtcacgcccaggccgcttttaatcttatctgccaccccaaagctacgggatgaaatggtcacgaggtttcccgccgtcgtcaacagcgtttcccatcctttaatccagcctttttgttgcagcagcgactccaccatcagatggttggtatccgaacgcgacggactgctcatcagcagcgccccctgataacggggatcggtcaggtcatcccagtccgctggcgcaggcagatgccgggtcatcagcgctgagcgattcatcagcaaaccgaacccggagatcgccacggccacggaggtggagcgaatggattccggcaccagatgttggctgactgccggcgcaccgctgaacggcgccagtttttgatgctcctgaagatgctgcagcagcatcggcgacgaagtcaggatcagatcgacattttcggcatttgccgtatcaagcaactgttccagcgaggcgctggtgcggttgagcgtccttatcatcaccgaccccggctctttctgccagcgatcgataatccacacggtggcgctgggagaaaatgtcgtcgccatcaccagctcattgccttgcgccgcacagggtctcagccatgcgctcagcagcagcagcgcgaacattttgctcattatcccgaccccacgaagaaatatgtttgtgatcccgttcataaatattgaaataccgtaaaaaccgcgttgagacaaaacttacccgtttatgacatctggtgaattaatcgccgcgagcggaaaaatagtcaaacgggcgtccgggaatatcgggaaagattaccagataatgattaggcaatttgttagtgtccgcacaagccggacataaaatcagcgcaaaattaattacgcaaaatctcgctcatgccagatgggtcaaaaacaacccgtccctgcattattttgagtcaattttgactcatttcgacgatttgaattttttagccgcttatttcacccttcggggtaattactcctgatgttcatatcaatataaatacaggtgacgacatgttatcattattaaaaaaaggcccgtcggcgaataaagttcctgctgagaaaattcaggcaacctatggtcgataccgtatgcaggcgctgctaagcgtatttctgggatacctggcgtactatatcgtgcgcaataacttcaccttatccacgccctatctgaaagaacagttagacctcagcgccacgcagatcggtttgctcagcagctgtatgctcatcgcctacgggatcagtaaaggcgtaatgagcagcctcgcggataaagccagcccgaaagtctttatggcctgtggcctggtgctgtgcgccatcgtcaacgtcgggttaggattcagtaccgcattctgggtcttcgctgcgctggttgtcctgaacggcctgtttcagggtatgggggtcggcccctcttttattactattgcgaactggttcccgcgccgtgagcgtggccgcgtaggggcgttctggaacatttcccataacgtcggcggcggaattgtcgccccgatcgtcggcgccgcattcgccattctcggcaccgagcactggcagagcgccagctacattgtaccggcctgcgtggcggtggtattcgccattagcgtactggtgctgggtaagggttcgccgcgcgaggaaggtctgccttcgctggcagagatgatgccggaagagaaagtggtgctgaagaccaaacacggccagaaagcgccggagaacatgagcgcatttcagatcttctgtacctacgtactgcgtaacaaaaacgcctggtatgtctcctttgtggatgtgtttgtctatatggtgcgtttcggcatgatcagctggctgccaatttacctgctgacggtgaaacatttttccaaagaacaaatgagcgtcgcattcctgttttttgagtgggcggcgattccgtctactctgctggccggctggctctccgacaagctgtttaaagggcgccggatgccgttagccataatctgtatgacgctaatcttcatctgtctgatcggctactggaaaagcgaatcgctactgatggtcacggtattcgcggcgattgtgggctgccttatttatgtcccgcagtttctggcctcggtccagaccatggaaatcgtccccagctttgccgtcggttcagccgtgggtctgcgcggatttatgagctatatctttggcgcatcgttaggcaccagcctgttcggcgtaatggtcgataaaatgggctggcacggcgggttctatctgctgatgggcgggatcgtctgctgcatactcttctgctacctctctcatcgcggcgcgctggaacttgagcaacagcgtaaaatcaccgagcaggaagaggcccgactggcactggctgacgcacagtaagcgcctgaacccgggggaacaaagagccagcttgctggctcttttgtcgttgatagaggaatagatgtccgcggcggcttccgacagcggtataaagcaagttttcctgccatcactgatgttgctgctgagtggcctacttcgccgggataatcagcacctgacccggatagattttgtcgggatgggtcagcatcggtttattggcttcaaaaatgcgttgatactcattggccgagccatacatcgcttttgagattgcgctcagagtgtcaccggatttgaccgtgtaaaaacgactttccgccccgctttgcgtcaccttaacgccgtcactgacctggcctacgccagtgacattcccgaccgcaaccagaattttttccttatcctcctgcgaagcgacatcaccagtgaccgttgcggtgccatcttccgcaacatcaatattgaccttttcggcgccaggcagattaagtccatcgatatgttttttcagcttatcggcccgatcttctttactgtcgccggagacggcatcccatattttctcgcccgcttctttcacaaaatttaataatcccatctttccatacctccacgactgttacatgaacacatgttcctcggccccgttgacccaatgttcgggatattggttttgatatccaccatcgcgacaactgcttgaggcagcacaagctgccatcaaagtataatcaatgagcgtcaaagtgcaggaaatttgccatggtatggcaggaaagtctgtattccggcaaggcgacaccggatgaaagcgggcattgccccccgggaggacgaaaccggagattaccgccgactcatggccagcttcgcggcaaacaacagaaacaggcagccggtcgttcggtccatccatttcaccacggctggttttttcaggatgccggcggcatagcgagtggcagtaatcagcgttaatgaccacagcgtcccaatcaatacatggatggtgaccaggagaaaggtccagctcacgggtgaatgcccggcagggataaactggggcaaaaacgaaacgtagaagacgcccattttggggttaagcacattccccagcatcccacgcaggaaccagttactcgtggaatctgattcggccgagtgggtgttaaattgctggcgcgggcgcagaagcaactggatgcccagccagcaaaggtagcccgctccgcaccatttcaacaaggtataagccaactcagaaaccgccagtagcgcacctaaaccaaaggccaccagcgcgccccagataaagcacccgagatcgatgcctaacgcggcatgcaaggctttgcgtcccccttcagcagtcgccgtgcggagaataagagcagtatcaagacctggcgtcagggtaagcagtgtagcagcgagggtgtaagcaagaagtgaatcagtgacgagcatttcctgtctccgaaagagacaaggctactgaagggttcacatttttgcaacaagattatttcccctgatcttctgcttaccctgctccatttttcttcggggatgacagatgcaaagagtagcccatgactaagtaatgcttagtcatgggctgatgttcttacaggaagagcttaatgttgatttaaaataaccctgggatacgttagctcactttaatatcatccaggtcgatatcctcttcttcgtaatcattatcaacaatcacgtcgcgagggatatcttttttgatgacggcatagaccgtggcggtaacaacgatattcaccagcagggccatgatgcctgccatcggatgtgacatcgtggggatcatcagtactccgccaaaaggaaccgtcgcatccgcaccatagaccatggtgaccgccccgccgcacgcgccaccgatggccgcggcggcgataccgcggacgatatcgttcatgacgatcgggatagagccttcaacgatattaacaatccccattggaaccgccgattttaaggtttccacttcttcactgttatagatgttcttacgcagaagcttagcaatgaagaaagccaggccgaaaccaataggcgttgcggtgttaactaactgaagcgcggtaatcggctcatttattccctgcgcctgcagcgtgagaacgaaggcaaagcatgtcttattaagcgggccgccaaagtcaacaatacacagagcgcctatcactgcgcccaacacaagattcgatgacgtgcccatacttctcaggaaagatgtcagcgcttccgtaaagataccgataggcgtaccgatgatatagaccataatcaggcagctgataatggaggcaaaaaagggcacgatcaacgttggcatcaaaccgcgagcccagtcaggcaccttgacgtttttaatgatcgccagcgcaatataccccgcaatatagccaccaatcatcccaccgataaagcctgcgcttatggtattcgccgccagcccgacgacaaatcctggcgcgatgcctggtttgccggcaatcgagccagatattcccacggcgatcaccaccggcaacagcccaagcgccttggcgcccagggtggccatcgcctgccatacatcaaattgtcccggagttaacgtgtcctgcaccgttccgccaagccccatgccgatggcgataataaacccagaaccacagacaatggggatcagaaacgagatagcggtcagcagatgtcctttagggtttgctgcttgccatatttgttttagagacataagtcacgccctttaatgtagagtcgccaggccgaaataaaattatgaattgactatttcactgattttttcaatcaacttattgggggatttgactgccgtttccgtcgcgactttaacgactttcttgccggcaaatctctcctcgcccgttactttgacatcggcagcaagcaggacaatatctgctgcggcaatctcatcagcggttaacgggttctcaatgccgatggttccttgcgtctcgattttaacgttatgtccggcttttttagccgcagtttcaattttcttttgcgcaatataggtatgtgcaatccccaccgtgcaggcggtaacgccgacaatattcataatgtttctccgttaattaatttaataaattacaaatcgatattagcaagttggtattaagcatcggcgttttcagtttctgaattgaaaagcgcaatgattttatgtggatcagattcaacaagtaatttagcgataatgtcttcatccgccagtgacccagacacttgtgccaacaggcgaatatgggtggcattttgatccaccaggcaaaccgcaaataaaataacacagcggacatcgctgccatccatggtctcccagggaatggcatgttgcgtgcgtccgatggctaatgcggtacgggaaacaccggaagatttaccatgtggaatagcgatatggttttcaaaaccggtagagcctagctcctcgcgtaaccagacatcacgaataaagtcttccttattggtgacggcgccatcctggataagtaaatcggtgagttcttctatcacctcttctttggttctggcggtcatatttaacttgatgtttttaacattaagcactgtcgaaatatccataattcacccgcattcatatagagtggtcgttaaataacaaaccagcatcgctggcgtgatgcagatcttttaaggcttattcaaatacacactgtggttcgaagagaaataacccgttatgcagcgacagtttcccgctggaagatctcgatcattctgtcccacgcctggctgacatcctcatggagcgaaaacagacccgatgtgccgacgataaagacatctaccccggattcagcaatctgaccgaaggttttctcattgcaagagccatcaatttccgtcagatagttatagccattatttttgcgcatgttgatgagctttctaatcttgttcagcgactcaggaataaacttttgtccggcatagccagggtcaaccgacatgaccgtcactttatccagcagatgcgcatattcggcaatgctttctgccggtgtcgccgggttcagcaccaccccgcactttttgcccgcatccttgatctgattcagcaggcggaatattttgttattcgccgtctcgggatgaaagctgatgatatcggcgccggcctcgagacacatgggaatgatatcttccggatgattcaccatcagatgaacatcaatgggcacagtagtaatttttttcagattctcaataaaaaagggagacagtgtgatattgcggacgtaattgccatccattatatcaacatggtaaaaatccgcttttttattcattgccgtgatctgctctttgaactgcgttaaatccatgcacatcagtgacggtgaaaatttagcgctcataaaccacctccgataaatagttagttaaacattgcgatgatatgacccagcacgatgccgacaacgccaaagtctgcgtctccaaaggttgtggagcccagtcccatatcccccatcatgggcaagagaatggcaggcaggaacgaaatgagcagaccgtgagcaaaagcccctaccaccgccccgcgacgtccgccggtaatgttgccgtaaacccccgctgtggccccgcagaaaaagtggggaaccaggcccgggacgatgacgctcaagccgaacagcgggcagaggaacatactgaccagtcctgcgacaaagcttgcgaggaagccgacgatgacggcattcggagcgaagggaaacaccgtcggacagtccagcgccggcttcgcgtctttaaccagtttgtccgcaatccctttaaacgccgggacgatctccgcaatcaccatccgaaccccggcgaggatgatataaactcctgcagcaaacgtgagggactgaataatggcgaagataataaagttctgaccagcgctcagggtctcctcgacaaaggatttgcccgcaacgagcaccagcaccagaaacagaatcatcatggtgagagagatggccaccgatgagtcgcgaaggaaattgagcgacttaggtactttgatctcttcaatcgagggactacctttaccaataattttgcccaccagcgcggacagcaggtagccaatagatccaaaatgcccgagcgccagatcgtcggtgttggttattttacgggtaaacggctgcaagatagccggggagatgaccatcatcgcaccgagaataaccgccccgatggccaccacccatccccctgacaagccccctacagacaggataaccgccagcatcgcagccatataaagcgtatgatgtccggtcagaaagatgtactttaatggcgttagacgcgccagggcgatattgatcagcatgcccaataccataatggtggcggtttccgtgccgtaattcttctgcgccagagcggccatggcatcagtgttgggcaccacgccctgaatatggaaagaatgctcaaataactggctaaagatggttaacgtataggctataataccggcgccggcggtcaatatgacaaaacccatgatggttttcagcgtgcctgaaataacgtctgaaattccttttttttgcaacagcagaccgatcagtgaaaataaaccaaccagtatcgccggtgttcctagcacatcataaataagaaaatgaagcatgataaactccacgaatcagatagccgttgcttaaatgttttctgctaaaatttctttaattttattgnnnncaagtaaattacttaatccaacgacctttgcagagtgactgctaagatgttctgcaatgtctttggcgctaagaataagatcggcagtttcgctttttgccgacgtcaggtcggtatgtgcgacttcagcttctttattcatttcggcaaggatctttttgacattcatttcaacgatgaagctgctgcctaaaccattaccgcacacgataagcacttttttcattctgttttccttcagtcaataacggcctgaatcgccttgctatcatcggcatttaacaatcggtgtaacttttgctgatcgctaaagatttcagccagttcaccgatcatcgtgatatgttcattcccggaacgagcgcatagcatgattaccacgtataccggatcgttctcttccgagccgaacgacaccccttctttaatatgaagaagcgataatccatttcttaacaccccctgttcaggacgggcatgaggcatcgccaagccgggagctaatacgtaatagggcccaagttctttatggctttgcaaaatcgcctcaatatacgacccggctatatacccttgcatcagcaagggttctgctgcaagtcgaacggcattttcccagctatctattgagttaatgactttaattttatccggggttaaccagtctctgatcatatgctctcccgagggggtctatgtgctgcactataaacagctaaataaaatgcaactgtgatacacctcccaaagttagcgctaacaaagaaaaatgttaaaaagtgcgttaccgctaacactagctataatgtgctttccccctcgctgtggtaagttataatgcgattcgcagatatactttcgttatattttatttttcaaacggttggtgattttggtgaagagtttagacgcggacggtagcccgaaagaaaaacgacgtaaaggaacgggtaagataaccctaaccgaggtggctgagtttgtcggtgtgagcgccatgaccgtctcgcgagcgctgagaatgcctgaaaaagtgaatcctgagcttcgcgatcgcatcgatgcggccgtcagtcaactcggctatgtccctaatctgcaggcacgtaatctggcgtcggtccattccgatcttattctcgccgtcgttcccaccttctcttcgccgggttttttgccggtctctgaagcgctgcaaaaagtgctgaccgaacgcggatataccatgatgtttatggaatccgggcatgacggtcaaagtgaacaaaagacgtttgaaaaaatgctcgcctataacccggcggccattattcagttcaatatcgataccattgagagctgcacccagttgctggccaacgtggatgttcctattctggaaattggcgcgctaaatacccaccctgtgggtatgtgcatcggcgtggattacggtaaggccgtaaaacagatcgtgactcatctggccgacgcctcattaaaaaacatcgcactgctctgtaccccggctaataacacaatgtttcgccagttgctgagcggatggaatacggcgatgctcgctctgaaccgctccccgcaccgggtggtaaccacgcatttgccatccaccatcgccacaggcgtcaatatattcaaggatatgatgattacctggggcgatctggatgcgttaatttgcacgtcggatgaaatggcctgtggatgtatgatggcctgccacagtgccggcattaaggtgcccaataccgtagccattgcgagtttaggcggaggagtgttatcgacagtctgttcccctgccctgacaaccgttgagtttccctggcatgacattggggtgaaagccggtaaagctcttctcgaactgcttaacgataagcctggtgaaaagttcattgaaattccgtcagtgctcaaagtccgggccagtaccgcggcatgagcttaatatggggcggtaaggcttcccgtgtgtagtagccaggctttctaccaggaagaatgtctctctgcgagagtccatacaataaatgcccagctcataaagcaaaaaatagtcgggacagtagcgttttttcgctactaagcgggtagaccgccagcctcatttcccgtttatcttgccagccgccccaggcggtgatttcgtagcctcgacccgcctgggcggctttgcactgaagtccgtctagcgccagtccaggatatacgatgtctcctacgccagttagcaggcaaagcgcaccgcgataattcatttgcaccgccctggtgccgcacattcatcatgccgccccccgtcagacatgccctcattacattaactacttgaatataaaaaattattttatatggcacgtttaatgctcttcgcttgtataccgcaatgtggacaagaacgtatgccatatggccacaacaggtcgccagtctgcggtcgcaaccttcccctttctgtgaggcatccagggtggatgcgtttcacggaagcctgcttactgaaaacggagaacaacatgacgacactcagcgaaccgttggttaccccgaaatttggcaaatggcgccagctggtgctgggcctgatctgtatggccgccatctccagtccgcaatatgtctggacgctgttgacaaaacccctggccgccaaacttggcgtcggtctgccagaattgcaggtcaccttctcgctgctgatcatcctgcagaccttcttttccccttttcaggggcggttagtggaaaaatttggcccacggcggctgatcgctattggcacggtgatggcgggaatgagctgggtgctttccgcgcaggtgaatggcctggcaacgctctggctggtttatggctgcatgggcggcctcgggaccgggatcgtctacatcggcgttgtcggcctgatggtcaaatggttcccacagcagcggggatttgccgccggcgcggtggcggcgggctacgggatgggggccatcataaccaccttccccatctccctgtcgctgaccactaacggccttgaacatacgatgacgactttcgggatccttttcgccctcgtcggcttcctcgccagtcaggggctgaagctgccgccccctgctgtctccctgcccgtcagtcaaacggtggcgcagagcagcagatcgtttacttcccgggaaatgctgcgccagccgctgttctggctgatgttcgccatgatggcgatgatgtcgacttccgggctgatggtcacttcgcagatggcggtgttcgccgaggatttcggcattagccaggcggtggtgtttggcatggcggcgctgccgctggcgttaacgatagaccgctttaccaacggcttaacccggccgctgtttgggtttatttccgaccgcttcggccgcgagcaaaccatgtttatcgcctttgcgctggagggggtagcgatgatgctctggctggcgtgccgggaagatccgctgctgtttgtcctgctctccggggtggtgttctttggctggggggagatcttctcgctcttcccgtcgacgctcaccgatacgttcggcagcgagcatgccgccagcaactatggctggctgtatatttcgcagggcatcgggtcaatctttggcggtccgctggcggcactgctctatcagcacactcacggctggcatgtggtcttcagctgcgcgattggccttgattttgtcaccgccgccctcgcgctgtgggtgctaaaaccgtggcgcgcgcgctttatccgccagcatagctaatcgtccgccgggcagaagtgacggctcgcccgtcacttcactgatattcgctacgcaacagcgcgtacaggtactcatcgccccactcgcctttaaaaaagatattctgccggtaatgcgcctcgcgacgaaagcccagcccttccaggagtttgatcgcgccggtattgcgggtgtctaccaccgctgtcagccggtggtgggctaactgttcaaagagtaaggccatcaccgcccgcatggcttcccgggcatacccctgatgctgatacgcaggggaaaaggtcatccccagctcggcttgtctgccgtgatctaagaagtggatccccacatctcccgccagcgcaccgttggcctgaatctctacggcaagctggaaccagctctcatcctcagcaaaggcctgcgaacgctgttgttcatagaaggctgtcgcctctgtcatgccgtagtgggtccagctctgaaagcgagccacctccggcagattgcgataatggctgaaagacggcagatcttccgttctgaaccggcgcagcagcaaccggggcgtggtcaggggtaacatcatctcttctcttcttgtagaaagtacatcattcacagcttatgtgtataaaggtccgaataatacgtcggttcagaaacataaggacatgacttgtgtatgtctacgcaatcttgtttttattgagggaaccgacgccgcataaaccgcggctgatttactttttgcccgtctggcggcaagatccggcataatgcaccgctgtcgcaggacggccgtgtcaccggcaatcgtgacagcgaaccattcgacaggaaaacgcatgaagccaaaacaagcggacattctccgccacgccagcacgctgtttaatcgcgaaggatatcagtcgcccagcatcgagcggattgctgaacatgctggcatctccaaaatgaccttctaccgctattacgccgataaagaggcgctcattctggctatcctcaagcagaaagagagcgaatttatgcaggatttggcgcagatcaccgcggataaagccagcgcacgggaaaagctgttcgccgtgttcgactactaccatcgctggtttacctgcgaaacgttccacggctgcatgtttactcgcgcgctgtttgaatatggtgcgtcatcgccggcgatccgggagcaatgctcccgatttaagtcgctcctctggcagttcttccgcgatatcctcctgcaggtgttaaaaccggaacctgccgagcgggtggccatgatgatggtgatgctcatcgatggcgccatcgccgcccagcaggccgagtccgccgaatgccgggagatcccgccaggggtgaccgcctggagcgcggccaaagcgcttatctactcagaaggcggtacgctgtgagatgataagctgccgcccagcgactgcagggccgccagcagaccatcatagtaatcgttgcaggtttgcagacgcagcgcggcgccaaagtagacctcctccatcgccgccggatgttttttgccaatcggcacaatcacattgttcagccagccgtccgcatggccgatatcgaccgtgatatgttcggcatagtaatgcacgtcgcgctcggaaagcccaatccgccgacagcccgccaccagtttttcatactgcggcgggtcgagcagctcggtcatcgccatgacccccagcgatttgtaataatgctgacggtttacgccgcccagcataaaggcgttatacccggccagcccctgccactcgtacaaatgggcaaaatgattgtccggcaacgcgatattccgccgcttcagtaaatccttatacagattaacgtgggtgatctcggtgctgccctggcctatctcatcccacagattttgcgccatctcagcgcgggtttccggcagcgagcccaccagccccatcgccaccagatcgaagaaaagcagattgagggcgctgtcgcttttgaagaaatagtcgatttgcgccgcagaggcctcgctggcaaggaaatagaacagcggatgatgagacgccgggtgctgctggcataaggagcgcagttcgtcgacgatattgccggcgttaagcattggtctctggtggtggaagcgtttgctttccgcccgcagccactcagactcgatgtaatttctgatcccggaaagcagcggatgaaactgattggcagccgctggcgagagcgggtcggcaagccaggactgataaagaatgaacagcgcgtggtgcgcacgctttttggcctgtggatcgtcagcggagaaggcgcggatgcaggtattctcagtgagatgccaggctctgtcggccaccagcgggttggccgtcagcttcagcgacagcgcgttgctgtgcagaagctggtcaattaactcatccagcgccagcctggccatcaccgcggtctggtcgcttccaatcaccccattatctgtgttacgcatgatttatccctgtgaaatacatggctactatacggtatagtaccgtccataatgcggcaacgtatatttcacacgcattttcaatttattgtttattaaaaagtttaaatgagtacaacaaaaaccactaaaatattattgatattataaaagcaataacattaccattcagtacagtgacaaacgacacaaggaatcatcatgccttatctgttactgacgctggcggctctgttctggggcgggaattatgttgtcgggcacgtgctggtgcagggcgtggatccgatcctgatgaccgaagcgcgctgggcgctgacggcgctgctgctgggcctgctctaccgacggcaaatcgccggcagtcgccacctgctgcgggcaaacgccccggcggtggtggtgctcaccctctgtggccaggtcagcttcccgcttacgctctatattggcctgcaaaccacctccgcgctcaacgccgccatctatatgtccgccacgccgagcatggtactgttgattaaccgactgtttttccgcgatccggtatcagggcgtaactggcttggagtggcttttagcaccctcggcgtgatgatcctcttatttcagggaaatccgctgcacgccgcctctctgcacacctttgccgtcggcgacctgtgggcgatggggtcggcgctgagctgggcgctctactgttcgctgttacgtctgaaggaccgccgtatcccggcgaatggctttgtcgccgtcagctcgctgctcggcgccctgatcctggtgccaatcgtcatcttctggctgatgcgccacccggcgcaggactgggcagcctggcgcgagccgtttttcctcagcggcctggcgtatctggtaattttcccatcgtggctggcctatttgttctggaacaaaggtatcgccaccattggcgccacgcggggcgaaatttacacccacatcatccccctctccggcggggtgttgagcatcctgttcctgcatactcaaccgcaggcctggcatctgtttagcgcgctgttcatcatggtggggattgggatctgctcgctggagaaacgccaggcggcgtctattcgtctgcgtgactaatgtatgcgaccgggcgcctggccacgcccggtcacaaatgttaacggctggtggagagcggctggtgatgtcccgctcctgcggattggatcacccggccttcgcgaccaaaaaaggtcaggacggtaatgacaatcgccaccgtcccggccaccagggccattgccaggccgtagttatgcccatgatgctgggcgattgatgcctggagagtggcattcaccgaagccagcaaattacccagctggtagacgaagccgggaagcaccgcccgggtgttggccgggaccagttcattgagccaggtggggatcaccccccaggccccctggaccataaactgcatcaggaacgcccccgcccccagcgccagcgagccgctggcgaaagcccacagtggaatgaccggcagcgccagcagggcggcgatcataatcgctttgcgtcggccaatcttctccgacagcgaaccgaagaacactccaccaatgatcgaggcgatgttatagcagaccgcgatgatgctgaccgttttaggctcgaagccgtgctgaactttcaaaaagaccgggtaaagatcctgcgtcccgtgagagaagaagttgaaagccgccatcagcaccaccaggtacaggcacagcttccagtggctacgcagtaccggcagcagggccgtactctctttattctgcctggccgcctgccaaaccggagactcctcgacgcagaaatagataaacggcagcagcagcaccggcgcggcgccaatgacaaacatcccgcgccagccgagttgttcaaaaagcagcccataggcgacggccgccagcaaatagccgaaggggtatcccgcctggaacaggccggacatcaggccgcgcgagcggtcggggatcgtctccatcgccagcgaagaggccacgccccagatcccgcccatcgccacgccgtacagcacccgcagcaggaaaaacagcatcaacgacggcgcggcggcggagagcagctcaaaagccgagaagaacacaatattgagcatcaggattggtttgcgaccaaacttctccgccgccctgccgaaaattagcgcgccgacgggccgcacggccagagtcagcagaatcgccagggtgacctcctcaaggtcgacatgaaacgagtgggcgatatcgctcagtaaaaaaactaacaggaaaaagtcgaaagcatcgagcgtccagcttaaaaaactggctatcgccgcattacgctgtcgtgaggtccagccgtgcatcttgtcatccctatcccgacggcattgccgggagtgtgcgcggcgtccagcagggcgagctggggttaccgcttgtgtaaattgtttgtatagaaagttgctcttttgttaattacaccccttttacgacaatcggcaagtttattagcatgctaatttgtttcaaattgcgtgttcccctcaccggttcggtaattttcgaccagaattaaaaccaggttcgcttaagcgaagcgtcatcaatgccgcatctgcccacaggaagggagagaatcatgaagagaattgccatcgtcggcgtggggccgacggggatttacaccttttatgaactggtgaagcgcggtgagccgctggccatcaccttgtttgaaaaagaggcgcaggccggggtgggtatgccctacagtgacgataataccgcggcgcaaatgctggccaatattgccagcattgagatcccccccatcgacctgacctacctgcaatggctgcagcagcaaagcgagaactggctggcggcgcgcgggcttgaacggcacgccctgcatgagcgccagtttctgccgcgggttatcctcggcgaatactatcgcgaccgttttctttacctcgttgagcgggcccgggacgtcggctttgtgattagcgtttgtgaatcctgtgaagtcacggatattgcggttcagtccaccgggatcgccatccacaccgatagtgcagcagacccggtaatcgtcgacctggtggcgattgccaccggccatctgtggcctgaagaagagcgcgccagccgacagtacttccccagcccgtggaccggcctgatggaggcccgcattgccccctgccgggtggggatccttgggacttcattaagcgcgattgatgccgccgtggcggtagtggcccgccacggcgttttccataccgaggacgacaaaacgacccatttttccctccatccaggcagcgaagcgctggagatcaccctgatgtcacgccacggcgtgctgccggaggccgatttttactgcccgatcccgtgggagccgctggagattgccactcccgccgccctcgaagcggccattgcggagggtagcgacgctctgttagatcggatttttgagctgatcgttaaagagctggaatatgccgcccccgactggagcgaggcgatcgggcttcgtcagctgacgcctgactgtatcgccgacgcctggtttgccgaccgcctcacccacgacccctttcagtgggcgcagcgcaatctgcaggaggtggagcgcaataagcgcgaacaccacacggtgccctggcgctatgccattctgcgcctgcatgaggcgattgaaaccgtggtgccgcagttcaacgacgcggacagccgtcgcttccgccagggcctcgcccgggtatttatcgataactacgccgccattccgccggagtccatacgtcggctgctggccctgcaccgggccggcattctgcggatcctgacgctgggcgaagattatgagctgcagcgggagcctgaccggacgctgattgttcatcatcgtcagcgctgcgaattcgatgtctttatcgatgcccgcggacaaaaagcgctgaaaactcgggatctgcccttcccttcactgcgccagcagctgctggcctgcggcgacgacattccggacgtcggtgatgactacacgctgcaggcgccggagacagtgcgcggtcgggtcgccttcggcgcccttccctggctgatgcacgatcgcccctttgtgcaggggctgacggccagcgccgagattggcagcgcaatggcccgcgccgtgtcgcagcaggccgccggccgacggcgccgtctctggtatatcgaatagcggagcgcttaagcgcaatatccgaatactgggggggtgaacaggcgtgctataaacagcaactgtccgtcccctgcacgaccacgtttaacatttacgaggtattcatgagtcatctttttagcgcgacgcgaattggtcaactcacccttgataaccgtatcgttatcgccccgatgtgtcagtactccgccgacgagggtaaggcgacctcctggcaccggatccatcttggccaactggctttctccggcgccggcctgttaattctggaagccacggcggtagagcctgcggggcgtatctccccgggggatctggggctgtgggatgatgaaaccgaaaacgccctgcgcggcgtagtcgaagatattcgggcctggtcgccgatccgtctggggatccagctgggtcatgccggacgcaaggcatcctgcgccgccccgtggctgggaggccatcagctggcgctcaacgatggtggctggcagaccgtcgccccttccgccgtggcgtttcacgatggcgatcgcgcccccgctgaactgagccatgccgatatggcgcgcatcaaagcggccttcgtcgccagcgcgctgcgcgcccagcggctgggctttgagctgattgaactgcacgccgcccacggctatctgctgcaccagtttctctcgccgctcagcaaccagcgccgcgacgagtacggcggttcgctggagaaccgaatgcgctatccgctggaagtctttaaggcgatccgcgaggcagtgggcaacaccatggcggtgggcgtcaggctgtcggctaccgactgggtcgaaggcggctgggactgcgagcagtccattaagtttagccagcagctggaaacgctgggcagtgactatattcacgtctccagcggcggtttgtcgccgcagcaggcgatcaccgttgggccgggataccagttgcctttcgcccgcgacattcgccagcaggtagccatcccggtgattggcgtggggctgatcaccgacccgcagcaggcggaagcggcgctggagaatggcgatgccgacctgatcgccctcgcccgcgcggtactctacgatccgcactggccgtggcacgcagcggccagccttggcgcccaggtccgtgtgccgtcgcagtatttgcgctcggagccgcacggcctgaaaggcaccctgctgccaaaccgttgaacccacggcgggcataaaaaaggggtatcgtaagatacccctgagcaggatgttattgcggtccatgtgccgggcggcgacgacgccttgcccggcctacaaaagggtgatacccggtcattgcgcagccaacccgctccctgcgtaggcccgcgcaagcgcagcgccgccgggtaatctatcaggctccgctccctatatttccgggcggcgggtcagacaaacaccgcgagttactgctgtgcggcaggcggcgcggcgttctgtttatccttcgcgatactgtcctggatggctttggttttgctcgccgcttcagccgagagctgattggcgtcaccgatggcgttgtctttaatctgacccgcctctttgactatgcggtcactttcctgctttgcgttctgcttcaccgcatcggcctgggctttcgcctgctgggcgatggcgtccgccttcttgtccgcctcggccttgatggcgctggcctgatccttcaggcgatcggcctcggcgtcagcctggcttttcagcgtatcgatttgcttatccgcatcctgtttaattgcctgcgctttatccgccgcggcatctttcatctgctccgcattatctttagccttatccagtttgttatcaactttcgacgcatcgtcgcagccaaacagggtcaggcacagggcggaagcgagtagtgttttattccagagtttcatcagcattcccttacaggttaagtcgttatccagctttgtgattcgttgcattaatagcattcacattttatatataaacgctcagccgatagagtcaaggcgacagcgccgattgtcagtccagggtcgccaccagcccctgcagccagtcggcaaagacccgaaccttatgcgagagatgccggtgcggatagagcagcgacaacggtcgacgcggcgccggaaagtccggcaaaacttccaccagttgcccgctgtcgatataaggttgcaaaaagaaacgcatcccctgcagcatccccagccccgccagcccggcagcagtaaagacttcagagttgtccagcaccagtttaccgggaatggcgatctgcctgatgccctccggggtctggaatcgccagggcataatctgtcggctgctgctgttcacccagttcaccgccagatgcgactgcaggtcctccagcgtcgcgggcgccccatagcgcgccagatagcccggactggcgcaggtggttaacgccacctcccccagcgaacgcgccacatagtcgccatcctcaagatcccccacccgcagcaggcaatccagaccatcgcgcagcatatcccggcgtacgtcggagctgctgaggacaatctccacctccggatgggcctgataaaaatccggcagatgcgggatcaccagcagccgggcaaaggcgatcggcatatcaacgcgcagctgaccgcggatcggccggtccggcgcgaacgactccagcagatcgtcggcctgggagagcaacggtttgctgcgacgataaaactcttccccctccggcgtaagatacagacgccgggtggtgcgctgcagcagccggaccccgctctcctgctccagctgctgcagtgctttggtcaccgccggtcggtggatctgcaaattttccgccgcctgggcaaagctgccggcatcgacgatttcaataaaaattttaatattttcaaacagattcatttgcatgatggcccgcctcccacttcttcatcagttcacattattactaatttaataatagtgatgaaagtttttgctcattttttaaaacaataaagacgcctacactgccctcattgccgcatcgctggggcgaacaaatttataacttattaacatacaaggaaaaatagcatgcaacctaaccgcgtcgcccgcattctgggtattgaaaaaccggtggtccaggggcccctctcctggctaaccgatgctcgtctggtggcggccgtcggcaacgccggtgggcttggcgtgctgggcccgaacgccggactgacggcggcaaccgccgtctccaccccggaggccaccgccgagaaaatgcgcgaagagatccgcaaaaccaaacagctgacggagaaaccctttggcgtcaacctgatcccgacggcggaaaatgacatctggacgccggcgatcctcccggtgatcaaagaggaaggggttaaggtggtggtctacaccggctacggcgacggttcgttaaaaccggcgctgttcgacgaactgaaagccgccgggatcaccattatctatcgtgacatcaacccgacgccggagaacagccgccgcgcggagcaggccggagcggatattattgtcgccaccggctttgacgaaggcggcacgctgccgggtaccgccctcgggaccttcaccatcgtcccgctgatcgttgacgcggtacagcgggttccggtgatggccgccggagggatcaccgacgcccggggcgcgcgcgccgttcatgccctgggggcggagggcgtcttcgccggttcggtatttatcagcaccatcgaaagccgggttcccgactcggtgaaagcgaaaattgtggccgccaacggtctggatctgcgcctgttccgtactctgccggactactaccgcgcgctgcccggcaaactgagcgacacactggtggccatggatcgtgccggcgcctcaaaagccgagctggcccaggcgatgggcgggctgcgcgggatgcggctgggcatgctggaggggaataccgatgagggatatatctcggtgggcgcggggatcggcaacatccatgccatcacctccgtcgccgaggtggtcaaccagctggcggtgtaaagccgccagccggggcacggtgaccggcgcgatcaggcgtcagccaccttctctaccgcccgggagaacgcgtcgatagccagcccgacgtcggcggcggtgaccgactccgccgggtgatggctgacgccccccaggcaacgcacaaacagcatggccgatggccagcgctcggcgatggcgatggcgtcatgccctgcgccgctcggcagcgtcagggaacgcccctgcaccgccgccaccgcctcgctcagcaccgcctgcaggtgactgtcgcaggcggtggcggcgatgcgataatactcctcggcggcgaaactcagctggcggcgcccggcaatcgcctgcgcctgccccagcagttcctccagcagcgccgtcagcggcgcatcctgcgggccgcgaatatccagcgtcaactgcacctcgcccggtatcacgtttaccgcgcccggcgcacagcgcagggtgccgaccgtcgccaccaggttaccgccgcgctggcgggtcaggttttccacctgccccatccattccgccgccgcggcgagagcgtccttgcgatgaagcatcggcaccgtgccggcatggccagcttcgccggtaaaacggcagttcagccgtctggcgccgttaatcgcctccaccacgccgagcgccagccccgcctgctccaggcacggcccctgctcgatatgcagttccagataggcggcgatatcccgcgggtgacgggccgcgtgggcgatccgcgccggatcgagtccggcattcaccagcgcctgggcgacgctcaccccgtcggtatcgcactgtgacagccagctttcaggccaggtgccggtgacgccgcgactgccgagcagggtgatgccaaagcgggtgccctcttcatcgccaaagccgacgatctcgattgccttcgccagccgtcgcccctgctggtgcagacgctggaccacctcaatcgccgccagtacgccgagcatgccgtcgtagcgcccggcgttgcgcacggtgtcgagatgagagcccagcagcaccgccggcgcgccctcctgcacgccttcatagcgaccgcagatgttgccgacgctgtcctgccataccatcatgccggcggcctgcatccactggcccaccagctggttggcctgcagatgttccggcgacagatagacccgggtcagggcgtcggcggtttcgctgagggcggccagctggtcggcgcgcgccatcacccggctggcggccgcctctctctccgcctgctggcggacggtgtcactcatagggtggcctcggtgcggtagtgatcccaggccgcctgcatcgccgcgccctgagtggtggtgaacctgaggtagttcaggaccgcttccagcgcgctgagcgtctgcatcacgcagtctttacgcgcgttatagcccatggtgccaatgcgccagactttaccgtgcagcggaccaaacgaggtgccaatttcaatgccgaaatcttccagcatcagtttgcggacctgatcgccgttgaccccgttggggatcaccacccccagcacgttattcattttgtgccgcagatcgccaaaggtctcgagccccatcgcctggatgcccttcagcagcgcatcgccgtgcagtttgtggcgggcgatgccgttgtcgagtccctcctggaggatcaggcgcgcgcactcccgggcggcgaacagcgccgaggtcgcttcggtatggtggttaaggcgctccggcccccagtaatccatcaccatgccgagatcgaaatagttggagtagatcatctcgtcgacgccatcgtgatgggcatcggtgcggatcccctgctcaatgcagcggcggcggcggatgacctcttccatccgcgggctgagggtgatgggcgaggtgccggaaggaccgcccagacacttctgcatcccggcggacacggcgtccagctgccaggcgtcggtttccagcgggttaccgccgagcgacgcggtggcgtcggtatagaacagcacatcgtgacgacggcaaatctctcccagctccgccagcggctgcagcatggtggtggaggtatcgccctgcacggtgagcagcaggcgcggccgcacgcgcttgatcgcatcctcaacctgatccggtttaaagacctcgccccacggcacctcgatggtgtgcacttctgcccggcagcgacgcgcgatctcgcacagcagatgaccaaaccggccgaacaccggcaccagcaccttgtcaccgggacggatcgccgacagcagaatcgcttcgatcccggcgcgcgaggtgccgtcgaccagcatcgtccagcgattttcggtgcgaaacacgccgcggtacagcgccatgacttcattcatgtagtgggtcatcgccggatcgtactggccaaccagctggctcgacatggcgcgcagcacgcgcgggtcggcattgatcggccccggccccatcagcaggcgctgcggcgggttaatttgcgaaaactgagtgatatccatctgccattccttacgttagttaagaccgcgcaccgaggagataaactgtttcagttcgctggtctgcgggctggcgaacagcgttttgctgtcgccctgctcccagacgcgtccctgatgcataaacaccacgcggtcgcccacttcgcgggcaaaattcatttcatgggtgacgaggatcagcgtcataccttccgccgccagttgctccagcaccttcagcacttcacccaccagttccgggtcgagcgccgaggtgatttcgtcacagagtaaaactttcggcgacatggccagcgcccgggcaatggccacgcgctgctgttggccgccggagaggttggccgggtagtaatccagacggtcgccgagcccgaccttctccagcatccgctgcgccagctcccggcattcggcctgggacttcttcagtacccgccgcggagccagcatgacgttctccagcgccgtcatgtgcgggaacaggttaaagttctggaacaccatgccgatggagcggctgatctcccgggcctgtgaatcgcggttggtgatggtcatgcccccgagcttgatgcttccctcctggtagccctccagaccattgatacagcgcagcagggtgcttttacccgagccgctgcggccgatgatcgagatcacttcccccatgtcgatatccagatcgacgcccttcaacacatggttgtcgccgtagtacttctgcatctgattaatggtgatgagaggcattgaatttgttctccagatagcggctgtagcgggacagcggatagcacagaatgaaatagcccagcgccacaagggcaaacactttaaacggctgataagtgacgttggtcagcatcgtcccggccttggtcagctccacaaagccgataatcgatgccagcgccgtgcctttgatcacctgtacggcgaacccgacggtcggcgcgatggcaatgcgcagcgcctgcggcgccaccacccggtacagggtctggccgaagctcagcccgagacagcgcgaggcttcccactggcctttcggcagcgcgcgaatgctgccgaaccagatatccagcagaaaggcgctggtgtagagcgtcagggcgaccgaggcggcggtccacgccgagacgtcgacgccgaacagcgccacgccaaagaatgccagaaacagctgcatcagcagcggcgtgccctggaacagctcaatatacccgcggatcagccgtttcacctggcgtccgccggtgaggcgcagcagcagtaacggtaaggtcaccagcgccccgccggtaaacgcgaccagcgacagcagcaccgtccagcgaccggccagcagcaggttgcggataatgtcccagtcggtaaaagtggtcatcaggcctgtacccccagccatttacgccccgccgccatcagcagctggcgcatcgctatcgataacgctaagtagatcccggtggttaccagatagacctcaaagctcaaaaatgtccgcgactggatcaggttggcggcgaaggtcagctcctcataggagacctgggacaccactgacgagccgagcatcacaatgatgcactggctgaccagcgccggataaatcctctgcagcgccgggggcagtacgacgcgaacgaaggtttgcgtccggctgagcccgagcacgcgaccggcttcccactggcccttcggcgtcacctggatgccggcgcggacgatctcggtgctatatgcgccgaggttgaccaccatcgccagcagcgccgcttcaccggcggtcatcttcagtccgaggttcggtaaaccaaagacgataaaaaagagctgcaccacaaacggcgtattacggatgatttccacatatccgccccatacccggctgagcattcccgggcgaccgctgcggatcgccgccccgaggatgccgatcgccagtccgccgatcgtcgccagcaccgtcaactgcaccgtcacccacaggccggccagcagctccggccagtgcggccagagctcagagaaatgaagttgctccgtcatccccagaccttacgcgccgaggctggcaggcagtggcgctttcagccacttctcagacagaccgttgagggtgccgtccttaatgccctgctcaatgagggtatccactttcgccttcagcgccggttcgttctttttcagaccgataaagcacggcgagtccttcagcataaagctcggcaccggcgctttgtcggcgttctgccgggagatggccgccaccaccagattgccggtggcgacatactgcacctgaccggacaggtaagccgacagcgtagtgttattatcctcgtagcgcttaatctgcgccgcctgcggcgccacgctggtcagtaccatatcttccaccgccccgcgggtcaccccgatgcttttgccgctcagcgcggccgcgtccttcagttccgcccctttcgagccaaacacgccgaggaagaacggggcgtaggcgcggctgaagtcgatcaccttctcgcgctcggcgttcttgccgaggctggagatcaccaggtccaccttatcggtctgcagatacggcacgcggttggcgctggtcaccgggaccagctgcagcttgagcttcatcgatttcgccagatagcgcgccatatcgatgtcatacccctgcggctgcaggtcggtgcccaccgagccgaacggcggaaaatcctgaggcacggcaatacgaatgactccgcgtttttcaatatcctggagctggtcagcctgcgcggcagaaacagacgataggagacaagcggccccggccagcgcgatcaacagtttcttcatgatgtttacccgttacgttagcatgaaacaaaagattctttgaatctgtttttgcaactaatgtgccagatacagacgaggcgagggttggcgaggaattaaaacaaaaagtgagaaaggacaagcgttaacggaaaagggttcagagagcggcggcgccatcacgtggtttttattgcaccataataatgcacagcaccacgctggcgccccatcagcgttgttccagctcatccagctgctggtaaagcgaggcgatatcgtggatgcgcggacgaccgctgtcgagcgtttcatggagaaaggcattggccagcagattaatcaggctgttgaccgaggcatagctatcgtaggcggagacgctgtccagcggcgcgcagagctgccagcgggagagcggaaacaggctgtgggcctgcggctcgcacattaacaggaccggcaccccgtcgcgctgcagctgctgcagcagcgggcgtactattcgcggccggcggcgaaacgccatcattaccaccagatcatcggcggtcagatcgaccagctcttcgctgagactctgacccggctggggcagcaccagcacctggccgcgggcctgcagcagctgctggcgcagatgcagcgccgccggataggcgttgcgcatgccaatcaccacaatgcggcgggcggccaccatcgccgtcagcgcctcagcgaactggcgggcgtcgagggcgttgacccactgggtgaggtttgccatctcctgcttataatggcgcgccagcagcgtgttaccctgcaccgcgtcgcgctggtcggtgagcggcatcccgctctgacgcagagtgcgcagttcatcgcgcatatccttatatttgtcgtaaccgaggcgcttaaacagccggctgacggtggctttcgacacgccgctcagctgcgccagctcggcgctgttgtagcttatcaggtcgtcaaagtggtcaaagatgaaatccgccacccgctgctcctgcggcgacagcgaggcgtattgccctttcagtcgttcatcgagttgttgcatagcgccccctgtaactttcgtttcatcatccattcctcatcatactgtatctgctatgccttacacatagcgtgccagtgggaaaattctggtcatcgtttttatcaatgaaacgaaacgttcagagatggaacagcttttgcagtgttctgcgggtgattcgttcagaaaggataatttatgcacagtagcaacgtttcgacccacggcatggcggtggccccccaccacctcgccagtcagagcgcgctggcgatcctgcgcgagggcggcagcgccattgaagcgatggtggctgccgcggcggccatcgccgtcgtctatccccatatgaatggcctcggcggcgatggcttctggctgatcgtgccgcctgagggagaccccatcgccattgacgccagcggggccgccggatcgctggcgaccctcgaggcctacgccggacagcggcatattccccaccggggaccgcaggccgcgctgaccgtcgccggcaccgtcagcggctgggacgaggcgctgcgtatttcacgggacttaaccggccgcgcgctgccggtggcccgcctgttggccgatgcgatcggctatgccgaagacggcattccggtcactgcctcgcaggcccacgccaccgccagcaaactggaagagctgcgccatcagccgggcttcagcgaaacctggctggtcgcgggcgaggccccgcggcccggcagccgcttccgccagcccgccctcgccggtaccctgcgcatgctggccagcgacggtctcgacagcttttatcgcgggccgctggccgagcgtctggcgcagggtatggccacgctggggatgcctgtcaccctcggcgacctgcaggcccaccgcgccaggcgtccggggccgctgacgctccagcaccagcagggaacgctgtggaatcttgcccctcccacgcagggactggtgtcgctggcgatccttggcatcaccgaccgcctgaagatggccgatgccgacgacgcgcaaacggtgcaccgtatcgtcgaagccaccaagcgggcgtttgccctgcgcgatgcgcatatcaccgatccgcgccatctggatgtggatgtacagcagttgctcaccccggaagccctgcagccgctggccgacagcatcgacgacgccagcgcttccccctggggcggcggcaaaggcccgggcgataccgtctggatgggcgtcgtggataacagcggactggcagtgtcgtttattcagagtatctatcacgagttcggcagcggcgtggtactcccggacaccgggatcgtctggcaaaaccgcggggcggccttcagcctcgatccgcagcatctcctggcgctggcccctggcaaacagccattccacaccctcaaccctgccgccgcccgcctgaacgatggccgggtgatggtctatggctcgatgggcggcgacggtcagccgcaaacgcaggcggcgctgtttactcgctatatcctgcagggggtgccgttgcaggagagcatctcccgtccgcgctggcttctgggccgcacctggggccagtcctccgattcactgaagctggagggacgctttgcccccgcctgtatcgcgcgcctgcgcgagctggggcacgacgtagaagtgctggctgatttcagcgaagcgatgggccacgccggcgccattgtccgccatcccaacggcctgcttgaaggggcgaccgatccacgcagcaacggcgccgccgccggatactaaggagcagaccatgaccacacagccagactggagcgagtatctgacgcagatgactcacctgttggatatggagctggatgcgccgcgccgtaaggagctggagcgccagtttgcccgcatcgccgccatggcgcagccgctgatggactatcccctcgggccgcgcgaggagattgcgggggtgtataaagcatgacacttcaacatttcaccatcgccgagatccagcgtgcgctgcacgaaggcgaactgagcgcccgggagatcgcccgccagacgctggacgatatcgcccgcgtgaatccgcagatcaacgcctggaccgaggtcaccgcccagcgcatgctggcggaggccgacagcatcgacgccctgcgccgggaaaagcgccccctgccgccgctggcaggcattccttacgcggtgaaaaatctgtttgatgtcgccgggcacaccaccctcgccggcgccgaactgctgagcgaccggccgccggcagccagcgatagctgggcggtgcgccagctgcacagcgccggcgccctgctcagcgggatgctcaatatggacgcctacgcctatggctttaccaccgaaaacagccactatggcgcgacacgcaacccgcacgatctgtcgcggatcgccggcggatcttccggcggttcggccgcggcggtggcggccggactggtccatttcagcctcggcagcgacaccaacggctcgattcgcgtccccgcgtcgctgtgcgggatctttggcctgaaacccaccttcggtcgcctctcccgctccggcagccatccgtttgtcgccagtctggatcatattggtccctttgcccgtcgggtggccgacctcgccgcggtgtatgacgccctgcagggacgcgacccggccgatgactttcaggccgataaagccagcgagcgcaccggcaacctgctggagcgggggctggaggggctgcgctgcgcgcggctggggggctatttcaccacctggtgcgatgacgacgcccgggcggccatggatcgggtcgcccacgcgctgggcgccgacagcgagctgcagttcgcggatgccgccctggcccgctcggcggcctttatcatcagcgccagcgaaggcggcaatcagtacctgacggatcttcgccactcgcccgagcgctttgaacctcactcccgcgagcggctgctggccggcgcgatgatcccctccgcgtggtatctgcaggctcagcgttttcgccgtcatgctcgccaggcaatgaaatccctgttcagccaggccgacgtgctgatcgccccggccaccccatgcagcgccacgccaataggcgccgaggagatggtgattaacggccagccgctgccggtgcgcgccagcatgggaatgctgacgcagccgatctccttcctcggcctgccggtggtgaccgtgcccctgcgtaccgccagcggcaagccgattggcctgcagctgattgccgcgccgtttaacgaacaagcctgtcttcgcgccgcgcgggcgctggaagcgatgggcattaccgatgcccgagtggcggagagtgcagcatgatcaatctggataatgtagaccgcccggcgatcctcgccgaggtgacggcggcgttttatcagtatgaagaggcgctggtcagcaataacatcgaggcgctggatgcgctgttctggcacgacccgcgcaccgtacggctgggagccggcgaaaatctgtatggcatcgaggcgatccgcgcctttcgcgccgcccgccccgccgccggtctggcccgcgatctgcgccataccaccattaccacctttggtgcggatatggcggtgtgcagcaccgagttcacccgcgagggcagcgcccgcctgggccgccagcagcagacctgggtacgcttcccctacggctggcggattgtcgccgcccaggtcagtctgatggactgagtggcgtatacgggagcggaccggagactaaggtatccaccggcccgcttccggtccggtaacatgctatttggagtcgaagatcatggtgttcatcagagctgctgaagcaaaagatatcccctcgctgcaaacgctatttctgcagctgggctatcagacggagacggcgatcttagcgcaacgcatcactgccccgcagagcatgatgagtgcgctggtggcggaaacggaaaacgccgtgtgtggcgtaatcgttatcaattttattttaccggtacatgagaaccgtttatgggcattaatttccgcgctggtcatcgaggaatcgtcacgtggatcagggataggccagcagcttctccaggccgcagagcgcctcgcccgtgataaacaatgcgctcagatcgagctttcaagtagtgaaaaaagaataagagcgcatcaattttatgaaaataacggctacaaggaggttcgcaaacgcttcgttaaacatttgtcttaaccgcctgcgcgcgagggctttccccggatgaccgtaactatattttgcccagcaggatatttaacatgcggcgcaggggttccgccgccccccacaatagctgatcgccaaccgttaacaccgagtagactgggtcattatttagcgacattttcttgtagcggccaatacctacctgcagcgaaccactaatagcagccggggtcaatttactgacactctcttgcttattattgcggacatagtttacccacggatgggaatgggtgactaactcagcaaattctgcttcgctgacctcacgtttaagtttcagcgtaatcgccgcgctgtgacagcggatcaccccgacccgaatgcataaaccattgaccgggatggtacccggcgcaaggccaagaattttattagtttccgcctcgcccttccattcttcgcggctgtttccatcgcccagatcgctgtcgatccacggaatgatgctgcccatgagggggacgccaaaattctccaccggcatgcccgcgctgttaatcaactcactcactttatttaccaatggcagcacggaacctgatgatgtcagttcatcagcggataaatgctgactgatataagcgctttgcgcgattaattcccgcacctgtttggcgcccgccccggaggcagactggtaggtcatcacgctcatccattcaatcaggtcagccttgatcagcccggccagccccatcaggctcagcgtgatggagcaattgccgccgacaaacagtttcaatcccgcttttaccgcgcgatcgatattatcgcggttgaccgggtcgagaataatgcaggctttttcatccatccgcagcgccgaagcggcgtcaatccagtaaccttgccagccatggttaattaacgccggatagatggctttggtataatccccgccctgacaggtgatgatgatatccatttcggcgagtgcgctaagggaattcgcatctttcagcctgtcgcttttaccattaataaccgggcccggggcacccgcactggaggtactaaaaaaatgcgctgtaatatcgtcgaaatcattttcttcgatcatgcgttgcaacaatactgaacccaccatccctcgccaaccaacaatacccacctgcttcatttatttaacctttataagttatgagaatgttaatttgagtgtcgccataccttatatcgtatcccccaataaaggtcattacccagcacctcgatttttatcattattaaaatgtttcatctgccatcagcgatatttatctcttattacggtcaagcagatataaggcggcggcgactgtccaatattcggcattcaaaggtgaaacggcgtagcgaaacggcagcagcttcttctctgggtactatgaagagtaacttgcattttgatagttactatgtcaatttgctggcaaaagccacctggttactggacagcccatgaaaaatgaaccgctttgccacgctccctgccccatcgcccgcagcctgggccgcatcggcgacagctggagcatcatgatcctgcgcgatgccttcgcgggctttacccgctttgacgagttccagaaaagcagcaacgccgcgcccaatattctgtcgcgccgcctgaaggaactggtcgatgacggactgctggagaaggtgtgctacagcagcaccccgccgcgctacgaataccacctcacgccgcgcggccgcgatttccgcatggtgctgctggcgctggcggaatggggtaatcgccacttcgcccccgaagggcgtcagatgcagctggtggaaatggcaacccagcgccacgtggagccagtcatggtggataaagcgactggggaagagattatcccgggtaaatacgccatggtgccgggccccgccgcctcgccgctgatgaaatatcgtcatgaatatctgctgcgcaaacgcgaaggcgatagcgggcaaaaattccagccggaaccttacagagatgccagcaatgaatccgaccagtaagaaaaatattcttgtcctggcggccctgggcgctgccgccctggcggcagcgagctacggcgcttactggtggcataccgggcgctttatgcagaccaccgatgatgcctatgtcggcggcgacattagcgccatctccagcaaagtctccggctatatccagcagctggcggtgcaggacaatatggcggtgaaaaaaggtgacctgttgatccgcattgacgaccgcgattatcgcgccgccctcgcgaaagccgccggagaagtggcggcgcagcaggccgcgctggccgatatccaggctacccgccagcttcagcaggcgaccattgccggctctgcggcctcgttactggccgccacggcggcaaccgaaaaactggctaacgacaaccgacgctataacgccctggccgcgtcgagcgcgatttccgcacagatccgcgataacgcctccgccgattatcgccgggcgcacgccgagcaggagaaggccaaagcggataaaaccgtggccgaacgtcagctggcggtgctggatgctcgccagcagcaaatcctggctgccctggcgcaggcccaggctaacctcgagatggccaggctgaacctcagctataccgacattcgcgcaccgttcgatggggtgattggcaaccgccgcgcgtggtccggctccttcgtcagcagcggtacgcagctgctctccctggtacccgcgcacggcctgtggattgacgctaacttcaaggaaaaccagctggcgcatatgcgtgccggccagccggtgaccatcgtcgccgatgtgctgccgaaccatacctttaaggggcatgtcgccagcctggcgccggcgaccggctcacgcttcagcattctgccggcggagaacgcgaccgggaatttcactaaaatcgtgcagcgggtgccggtccgcattgcgctggaaggtgacggggcaaagcttgacgtcctgcgcccgggactgtcggtgatcgtcaccgtgaacgaaaagagccctcgatgagcaccgttcaggcgctgtccgccccgcagggtctgtcgatgccgacggcgaagaagatcttcgccttcgccagcatgtgcgtggggatgtttattgcccttatcgacatccagatcgtctccgcctcgctgcgggatattggcggcggcctgtcggcgggcgacgatgaaaccgtctgggtacaaaccagctacctgatcgccgagatcattattatcccgctttccggctggctggcccgggtcatgtcgacccgctggctgtttgccgcttccgcggcgggcttcacgctgatgagcctgctgtgcggctgggcgtggaacatccagagtatgatcgccttccgcgccctgcagggactggcgggcgggtcgatgatccccctggtgttcaccaccgctttcgccttttttcagggcaaacagcgggtcatcgccgcggcgacgatcggcggcctggcctccctcgcccctacgctgggtccaacggtgggcggctggatcaccgaaaactacaactggcactggctgttctttatcaacgttgttccggggatttacatcgcggtggcagtgccgctgctggtaaaagtagacagcgccgaccccactctgctgcgcggcgccgactatctcagtattctgctgctggccttgtccctcggctgcctggaatataccctcgaagaaggtccgcgctggggctggtttgatgacgcgaccctgacgaccaccgcctgggtcgccctgctctgcggcgtggcctttgttatccgcaccctgcgccatccgcagccggtgatggatctccgcgccctgcaggatcgaaccttcagcctcggctgctatttctcgtttatggccggcgtcggcatcttcgccaccatctatttaaccccgctgtatctggggagcgtgcgcggtttcagtgcgctggagatcggcctggcggtattttccaccggtctgttccaggtcatgtctattccgttttattcgtggctcgccaaccgcgtcgatctgcgctggctgctgatggccgggctgatcggctttgcggtgtcaatgtacagctttgttccgatcactcacgactggggggcggaccagttgctgctcccgcaggcctttcgcggactggcgcagcagtttgccgtcgcgccaacggtgaccctgacgctgggcagcctgccgcccgcgcgcctgaagctggcctccgggctgtttaatctgatgcgcaacctcgggggcgccatcagcatcgccctgtgcggcacggtgcttaacgacagaaccaatctgcactacagccgcctggcggaccatctgaataacgccaacctggcaatgagcgattttgttcagcgcagcgcggcaaacttcaccgtccaggggatctcgccggatgccgcgcagacggcggcgctgaaaaatctttccgcactgacgctgcgggaggcgcgaactcaggcattttccgatgctttctacctcatcatgatgggttttttaattgccgcgctgctggttcccttgatgaaaaagccgccggcacactgatactacaggagagttaactatgggcgtttccgttaaacgcattgtcgtcaccgggatggggattgtcagcccgctgggctgcggcgtacagcacgtctggcagtcgctgctggcaggaaagtcagggatcacccgactcagcgagcagctggtcgcggatattccctgcaaagtggccggccaggtgccgtccattgacagcgatccgctgcacggcttcgacccgctggcgaccatcccggcgaaagagcgcaaaaagatggatcgctttattgagtttgcgctggtcgccgcccgcgaagcgctggcccaggccggttggtcgccagcatctgaggccgaacaggaacgtaccgccacggtgatcgccaccgggatcggcgggttcagcgagatcgccaatgcggtacataccaccgatgaacgcgggccgcgtcgtctctcgccgttcactatcccctcttttctggccaacctggccgccgggcatgtgtctatcgcccacggcttccggggccccatcggcgcgccggtcaccgcctgcgcggctggcgctcaggccattggcgatgcagcgcggatgatccgcagcggcgaggcggatattgccctctgcggcggcgcggaagcggcaattcatcgcgttagcctggccgggtttgccgcggcaagggcgctgtccagcgcctacagcgaccagccggaaagcgcttcccgcccctttgaccgtgaccgcgatggttttgtgatgggagaaggcgccgggcttattgtgatcgaatctctggagcacgcgctggcgcgcggggccacgccgctggccgagctggtgggctacggcaccagcgcagatgcttatcacctgaccgcaggcccggaagacgggaacggcgcacgtcgggccatggagatcgctattcgccaggccggggtgaccgtcgacgagattgaccatatcaatgcccacgccacctcgacgcaggtcggtgataaaggtgagctggcggcgattaaaacgctgtttggcgcgcatccggtcgccattacctcgacgaaatccgccaccggccatctgttaggcgcggccggcgggatcgaggccatcttcaccattcaggccctgcgtgaccaggtggtgccgccgacgctgaacctgcatcaccccgatgaagacgcggcaggcatgaacctggtggcgctgcaggcccgcccgcagaagatgcgttatgcgctgtcgaacggttttggctttggcggcgttaacgccagcctgctgctgaaacgctggcaataatcgtcagctcccctgcggtactggccgacgggggatttccaccgttgcggcttttgccctgctgctggagtaaatcaagtacagcgcgatacccagggagacaatggcgcctattcggctcatcgagaatggaatcgacgcattgtccagccagccgaagttatcgatcaaggtcagttttgagcgaagaacggaccacactatctaaagaatgatatcgcctattatgttgggaccgctcatgttaaaaaagggatagcttttcttttcattgacgataacgaaggaattttcatggttgaggttgaggaaataaaaaagaaatatcccggcgcagatgcctggcaaatgggtgacagtccgcaactggctaacgaacttgctgacctgatcaaaaaagggatcaaaacggcctcttgcggatcttttgcctcttaccagcaggaagaatccgccccgagaatcgggagttataacattattcttgatggtcagaatgttccagtttgcgtgatcagactgatttcgatgcagctggttcgtttttgtgatgtcactgaagcgttcgcccgcaaagaaggtgaaggcgatttaagccttgaatactggaagaaagagcatcagagatttttcagctctgaaggtcatttttctgaagatatggagttgatcgcagaagaatttgaagtggttgaggtgctttaaggcaaggtcaacgggctgacgttttatcactggccactcataacactgttcgcttctggcgcggagcggacaagctgtcgagctaaaggtccgcattgagcaaggagctgacgtgccagctataattggtaataaaatgagagtagaactattctgatttgtttaaaaaaacatttttacatccaagggcaaaatattttttatgctatcttacatgctatctcaatatgccaggctacctgtgcctgaagttactctacgttcatggttaaaacaatggttgtcagagcaggaatcgaggtgtacagacagaagtttctcggcgcgatttccctggagagaaactggattatgtcaggaatattttttacaacgaaaactcaaaattgatggaawgcaatttcttactggcccccgttatcagggcggaaatattaacaaaccttttattgatattgtaggtatggattctgacctaaatcatactgcattagaactcattagtaaggaatggtcacaactcagagctcagtatgtccgcattcttgtacccggccagtccttcccgcagggtattcccgaccagtatatatatgccacttctttttctgaaccccctgaattcaatgataaatctcttactttgcaagtggcgacatacgaagattttgactggtgttgtcaggccctgggcgatgcctataagcatacatggcagacagttcgcgaactatctgcaagcaatttggtagcagttgatgacgaagagttgtgtgaccatatttctgagagagaagtatatattatctatgaaaacgatgttcgcgccgggttgctaatatgccagaaaggaaacatcgcttttctgagaggatatcgtattactgacaaagtaatacttcctgcttttcgtggtcgatcattgtcggcccgagcgcaacgcctgctgtaccgattattaactcattccgattcggaactatctttgtatatgggcacaattattccgcagaatatcccctcgatgaaaactgcagaaagagcgggacgaacttgcatcctaagttatcaatttctacccatctgcagaacccacgattaacagcaatgctaatttatcttcagcctacacaggggacgtccagggcccgggagtactcccctggacgcattaatgggcaggatgtgattgttgcgcaggctatcatatggcgtgaggtacagcagaatcaggcttcgtagcaatgaggggctcacagcgtccggaatccacccggtgccgtaaatcaccgtaaggtctgtcataaggtaatttcatcacgcatcgcgacaccttttttcttcatgcaggccttctctttcacggtttgtcagaactgtggaccgcagtaatctccactccgtgctttaatcaatgagagtgtgtcgggtgcaaattaaactacctttctcaacagcaaaggcgggatacccctgccctcgcagggtttctgcgtctggtaatatgcccatgacagtctcaaagaccgctttgagggtttcccggtttaaggcacaaaatcgcgtggcgttgcccccaaaatgcagcgaaaagcagcggtaaaggccgccgggcatgagaaaccaagctggtaagcgacctgtttgattggaacaccgttcgcgagaagatccaacgaagcgcaaattctggctctctgcttccatgttctaaaactaaagcctgtatccttcataaacaatcgggaaaaggtccgttccgacatggccgacataaaagccagctcgctcagcgatgcttcccagcgctgattgaccagtagcgatctggcagcgctgaataatcgctcatcattcggcatgggaagcgccatcgttaaaggtggagcctcgctgagaatttccagaagcaacaacgctatcttccgttgactcggtctggcgtagtcctcactgaacagccctgcgataagctctttgactaagggcgtagccgtgatcacatgcacctgctgactcttcgtaaagctcgtacattctgcgataaggctactgctgaaatagatcgccctgagatcggtttgtgaaagcagatggtaactatggatatgcaaaggcggtagccataatgcccgctgaggagggatcacccaacggtcactctctgtttgcaccagcataacccctctggtggcgaagagtagctgcccctcaacatgatgatggggaggatctgcctcgccgcgttgatagcttatcgcagtactggaccagcctgtggcttcatcatgtcttggcgctttatctatactacctggcatttcagatttagcccctgccattatcatatcgaaactggaaccacccggagtagagccttaggcaatgggtgcgtgacttatcatcctgatcatcaaagatattacaggagcttaacctcatgcgtgtacactttatcgtacatgaaagttttgaagccccgggcgcatatgaaacctgggcaataaaccagggtcatgatgtaacttactcacgcgtctatgcaggcgatcggctacctgatgacgccgtaggcatcgattttcttatcgttatgggcggtccgcaagatcctgacaccacgcttgaagagtgcccgcactttaatgctaaagcggaacaggcgctgattgcttccgcggttaaaaccggtaaggcggtgatcgatatctgcctgggttcacagctaatcggtgaagcgctgggcgcgccgttctctcatagcccggaaaaagagattggtaaattcccgatcacattgaccgaagacggcagtaaggatgagatgttctctcactttgggaaaacactggcagtgggtcactggcataacgatatgccaggtttgacgccagaggctaaaattatcgcttacagcgaaggctgtccccggcagatcgttgcctattcagaccgcgtctttggtttccagtgccacatggagctcacattggacgttgtagaacggctgatcgctcattctgagaaagacctgagccgtgcagcagaatatcgtttcgttgacacgcctgaagcgctccgggcgcacgattacagtgaaatgaaccaagtgctttttgactttctgcataagctggaagcacgttacaaagcagcgcaagcataatgttatgctcggtgagcttgccatcggttttgattttaatgtccgctcctggcacagagcggacaagctatctgagttgaaggtctgatatgagcgatcagcggacgttggctacactgttaaacgtcgcagactcagcttctgactgccagtttttcgcgagttgggccttcaaagtagatgctcctgatatggcaattacggggttgagtcagcacaaagcgaattgcttcccagactgaacgcccattcatcagacgttcccccattttgggctggctatcgacaaacgcctctaaccctgtcagctcgaaatccgggggatacaacccagtcacacgtatattttctttagacaactggtacgaaagtttagttgtaaacccgctaagcccgtgtttactggcaaaaaaagcggggtgcgcaattgaatctgtaaaattaggaatcccacatgaagatataattgagacgatatccgcactttctgaacgtcttaacccgggtagcaatgcctgagtcagcagaatagaacctgtcaggcctgaactgatagtatttatgatttctgtgtctgattgatcgtctaacgttcctgaaagccactgagcagcattgaggattaaaatgtctatgggcttgtctaaagttaacaactgtgaagaaaactgagaaagggattcaggtagggttaaatcacagagatgccctttcgccattccgccttcagccgtaatgatactgcaagttttttgaatgtcatcagcgcgcctcgcgcaaaaatccacctcgacgccttctcgcgctaaccatacgctcagcgcctgaccaaatcccgtgccaccaccggtaattacagctcttttacctctcagcatcttcatccatcctttattaatgaataggggggaatgtagatatatatgaggaagcagattgacatctttcagttagtgccattttttgacgatagggataagttgtactgctacatttccatcgcgctcctgtgggcatgcaacatccgctcctggcactagtctgccgtaaagggcagctttaagggaggagcggacgagctaacgcaggtgaagatccgctgtgagcgaaaagcggatttttgtcgttctgtcatcaaaactggcgacttatattaggatatcgcaatacccctcgccctcaggctacgtctgcttgaattgattgcctcaagaaggcggaggcggctttccgctgattgccgctacgcgcacagcaggcgtaccggtcatttatgtcagcgtcggattccgcaaggggtatccagaggtcagcaaaaacaacactatcttcgcttcgattaaggagaatggagtttttatggctgataacgagagcacggctattcatcctgatgttgctccagcagaaaatgaagtcgtcatcgtcaaacgcagagtcggagctttctcgtttactgaacttgagatgatccttcgtgctcaaggcatcgaaaacctgattcttacgggtgtaactaccagtcgtgtggtgctttccacagtcggacaagcttttgatctggattaccgccttatcgttgtgaatgattattgcgcagatccagatcctgacaccaatatgtttttacttaaaaaagttctacctcaacatgcttttgttaccagttcctctgaaatatcaaaacctgggcataaaactatgaatttctgacgtcaaaaaacgggaggatataaccggggatccccagtcatctgaacgtccgctcctggtggcgatagtcagcatcatgtctggcccaggagaaatctccagaagcgtcagtgcgagaaggaaagtcataaacgtttcgatgaaaggcatcctggtagagtccgaaaacatatttccgctacgttacctccgttcgatgcgggcaagaagcggacgttgtacttcaatcatcatcgatttgaatgacagcaaggtaacggctaatccaggtgacgtaaatgtgtcgcgatcccccagcttagaacggtacagcttccattaatcaactcgaaaacggcgtaactcgcattgggttgtgcatagcggtgaaaatcatccacagatccactttttaatgtcgcaagcacgccctgaatgacctgcccgtgagacacaatacatattgttcgatgatgatgttttttttccagactggataaaaaatgtatcattcgctgcgaagcatctgagagagactcaccccctggcggacaatactctgcatccagggtgaataatgcttctgcggcgtccggattattttgcagcagcgctacggttgtcatgccttcaaactgaccaaaagcctgttctttcagagccggttcagctatcagtgaacaataaaaacgctcagccaggcgctgtcccatttgccaggcccggccaagtggagacgcgtaaacacattctacccggtaatcactctctgcaaacgctgccaataaagctgatgtttgacgctccccacgaagcgtcaatgcgctatcactgtgtccctgaataatattttttacattccattctgtttccgcgtgtcgaaccagtatcacttgcatcattgcagggtcacataagccgttatttgaaatgttatcatctaaaaaccctcctttgatatgcaggcaagttctcagctctcgacgaaaaacaggaacaagcgtagctgataatggttatgttcagcttcagaagtgacgtagttatcgacgttaacgtctgctctggcacagagcgaacgcttccccttgtcgacgcgaaaagcaactctgcccatgcctctatctcagtaaaacctgaatcagctgcacgacgatatacactcccgctaccacctgtatgatccgaaacccccatctcagatagcgccattgatggcgttcgctggcatcagcggcttcaatggcgggatcataacgttttcttttcctggttctgaaggtatcgaatccccacaggacgagaagaatgatgatgatgattttttcaacgataagatggttcacaaagagagactccggtcttctcacggttacaggcagaatagataaaccgcctggatgtagccaccactaaatgtaggggtacctgaaaacgaagccaggccttcctggattatctgtcttatgaccgcgtaaacgcatagcaacgccataaaagcgacattcatttccgacacatgctgcgggagtccccttctccgacgcctcaggctgggtgataaaacgacggcggctgcccggtcacgcggcggaacatggtggcgaaagaggacgcattgtcgtatccaagggataatgccacttcgttcaccggtttgcctgctatcaaccatgccagggcgctcaccacgcaggctcgctgtcgccaggcggaaaacgacaggcccagctgcttcaggaaatggcggcgaaaggtactaggactcataaacagcgccctggcccagcgcgccgcaggatcatggatagaggggttaagcaaaaaagcctgacaaagcgccagcagcgccggatgctgcggcaacggaatgtcaaattcgcggaccggcatggcggccagttccagcaacatcaactgtatcagcgcgcgatcgcgtgggctgtcgtacaacggtggtaaatccacagcctcaagcagtagctggcgcaacagcggcgagacgctgatcacttcgcaacgacggtgtttaatgaaagcggccacacaatctggctcaatatacaagctacgcgtggtcacccctgcaaatctgacggcatgcacggtttcagggggatccagacagcgtgttgcggaggaaccacccattctccgtcctgcgtagtgacatacatcagtccggtcgcgccatacagcagctgtgcgcgacgatgctggtgcgggggcaggataaacccttgcgcatagtcattacctaacgccaccacatcacgatcgagtcgatcgacctcgtcaatttttacgttgcgcacacctgcctccctctgaccgatttacaaaggtaattgagcgctacgcaaatgggaagcagtacgcgaccggtataagctgctcgctcattttcaggtcggggatactctcttgaatgagatcgttattattgcgctggcaggctttactaccggcattaccacggtgctgttcggcttcggcggcggctttgtggtggtgccctttgtctatcaactgatgctccggcagccggcgatcgcgggcaacgccatgcatgtcgcggtggctacctcaacggcggtgatgatatttaacgccggctgggtcagctatcgaaactggcgggcgggcaggcttaccgcgcagacgctgtttccgttgttatggtttattgccattggggcggtggtaggctcctgtctggcggggatattgagcgagaagatcgttcgcgtgctgtttattctctatatgctggcaaccatcagcgattgtttgttgcgcaagggttttttcacgggcagcgctcggcgtcgcctgtccctgccagtggtcaccggcggcggtgtgattatcggtacgatcgccgcattgctgggcgtgggcggcagcgtcatgacggtgcccctgctacggcgacacgggtatgcaatgcaggagtgcgttagcgcatccaacccgctttctttgcccgtggcgctatgcggggctgtgacctatgccgtcattggctggcacagcattccgctgagcggatttttggggtttatcagcctgaaaattttaggcctgctcgtcctgaccggctgggccgggatagtgtttagccgccgggcaatccctgcggtacctgatgtatggtatgcgcgaatctatgtgctgctgctgtgcctggtactcctcgccatgcttattcaataatcaaattacattctggtgaaccggtgcaacagacgcggccgggcggagccctctccctggagagagggccaggttcaggggcaacaagctacccgcgatacggatgggtttcgcgccagtggtcggcaatctgctgccgggtgcagacccacaccttgtcgtgctgctggatatagtcaaggaaacgctgcagcgcgcggaaacggcccggacgccccagcagccggcagtgcatccccacggacatcatcttcggcgcggtttctccctcggcgtacagcacgtcaaagctgtctttcagataggtataaaactgctccgcggtgttgaatccctgggcggtggcgaagcgcatgtcgttggcgtcgagggtataaggcacgatcaggtgcggccgctggctgccgtcgctgcaggccacttcgctccagaaaggtaaatcatcgccgtaataatcgctgtcgtagtcaaagccgccgtgctccaccaccagctggcgggtgttagggctgtcgcggccggtataccagccggtgggcggtttgccgaacaggtcggtcagtacctgcaccgctttttgcagatgcgcgcgctcctcggcgatatccatgtgctgatagtggatccagcgccagccgtggctgaccacatcgtaatccgcggccttgattgccgccacaatctccgggtgccgcgccagcgccatcgccacgccgaaaacggtcaacggcagcccgcgctggctgaactcacgatggatgcgccagaaccctgcccggctgccgtactcatagagtgaatccatcgacatatggcgcgccgggtagctggcggcgccgataatatcggacaggaactgttccgaacccgcatcgccatgcaggacgtgattctccgcgccttcctcatagttgaggacgaactgcaccgcgatccgcgccccacccggccagcgcgcgtgcggcggctcccctgcgtaacctcgcagatcgcgaggatagtgttcctggttctctcccatctcctgccccttttaaaatggatttaacgactgaaactgtccgcttaacgcttttttctccgggaacgctaagtccccatgcttgctggtcgccaggcccagcgcgaccagagactccaccatcttcaccgccgcgctgacaccatcgatcaccggcacccgcagctcgcgggtcagctcctgcgccagggtcgccatcccgccgcagccaagaacaatcgccccgctaccatcctctttcagcgcgcgaatgcagcgctcacgcactttctcctgcgccaggccactgccgtcttccagcgccagcaccggcaaatcaatggcgtgcagcgccgcgcaatgttgatgaaatccgtactggtgcagcaaatgacgggcgatgatcagcgtgcgcggcagcgtggtcacaatggagaaacgggtggcgaccatcgtcgccatatgcattgccgcctccgcgataccgatcaccggcccctgggccagctcccgcgccgccagcagccccgggtcgccgaagcaggcgatcacatgcccatccactccctgctcgcgtccggccctgatctgctccagcacgccgaccgccgcgatggcttcgtcaaagtggccctcaattgacggcaccccggcgcggggacagaccgcaaggatctcggtgcccggcgcagcgaccgcacgcgcggcggcgcctatcgtttcggtcatcgccaggctggtgttggggttaatcacttgtatacgaacggaagacatcacgactccttgtggccggcgaacagccgggaaaaatcgggcaggctgacgccatcgcgctcgaagcacaggctggcgacaatatgatcaaaatggtgcatcagcgcctcgctgagcggctgcagggctttatcccgcagcaaaccgaccagctgctggtgatcgtcgcaacggcagccctgtcgccagggggcgccccaggcggcaatcactaaagaggagcgctggctgaggcgggtcaccatctcggtgagcaccgggttgccggagatagcctgcagctgaatatgaaagtcagcggagtggcggatcgccgccgggccgtcgtgcgtcgcatgggcctgctgttcacgctgaataatgttctccagcgccgccagatgcggcggctgacagcgcgcgatcacatcggggagattggcgacctcgagcagcgcccgggtgcgaaagatcgcctgggactcttccacgctcgggctggtgacgtgtgcaccacgtttgggcgtcaacgtgaccagttgcacagcggcgagtcgttgcagcacctttctgatgccggtgcggctcacggcgaacacctccgctagcgcctcttccggcagtttgctgcccggcggcagctgatgttcgacgatagccgtcatcagcgcctggtaaatgctttcgtccttgtcctgcagcgctggcgcggcctggagacgatgttcattattcattaacccactccggtttcacttatcgatagcagatcgtatacataaaatttattttttgtatacaagattcatcattctggcctggatcctgcaatagcctcagcaatccatatcaaagggttttcattcagaggagcaggtttcatgccacattcatcccacacgcagcagacgaagactcacgaggcggccgccggctacagtccgcggctatgtaatgacgatctggcgccgacccgcgaccagaactggagctggtacaatatcttttcattctggatgtcggacgtgcacagcatgggcggctacgtagtggcggcgagcttctttacgcttgggctggccagctggcaggttctgctctgcctgctggtgggcatctgtattgtccagctgtgcgccaacctggtggcgaagccgagccagatggccggggtgccttacgcggtgatttgtcgtcaggcgtttggcgttttcggcgccaatatcccggcggtgatccgcggactgatcgcctttgcctggtacggcattcagacctatctggcggcgaatgccctgatgctggtcctgctcaagttctggccctcccttgcctcgctgaccagcagcagctttctcgggctgtcgcccctaggctggctgagcttcgccactatgtggctgctgcaggcgatggtgttctggcatggcatgaacgccatcaaacgctttatcgatatcgccggtccggcggtttatgtggtgatgctggcgctggccggctggattgtatacaagaccggtctggatgggatctcctttaccctcgccagcaaatccctgagcgccggcgagcagacctggcagatgatcaccgccacggcgctggtggtctcctacttctccgggccgctgcttaacttcggtgacttttcccgctacggcaaaagcatgggcgagatccgccgcggtaaccgctggggactgccgtttaacttcctgctattctcggtggtgaccgtggtgattgtctccggcacccagtcgctgttcggcaaaatgatcaccgacccgatcgaaaccgtcagccgcgtgggtaacgatctggcggtggccatcggcctgctgaccatgatcaccgccaccatcggcatcaatatcgtggctaacttcgtctcgccggccttcgatttttccaactgcgcgccgcagaaaatcagcttccgtaccggcgggatgattgccgcggtgggctcgatactcctgacgccgtggaacctgtttaactcgccggagctgatccactataccctcgacgtgctgggcgcctttattggcccgctgtttggcatcctgatcgccgacttttacctgatcaaacgcggccgggtgtcagtggacgatctgtttgacgatacgccgcagggtaaatactggtaccgcaacggctttaacccgaaagcgattgccgccctgctgccgtcggtgggccttgggctgattatcagctttattccgaccctgcatgaagtggcgaacttcagctggtttatcggcgtctttctcggcgccaccgcctaccgctggctggctcgcgacgagcgtgaagtgcaggcgaaagccgccttccgctccggcgcggtggcgcaaaaagagtaaccttccccttctgccgcggcgtctggccgcggcaggctgcaaactggcaccaatcttgctgtttatcactattcccagagcgttaagagaaggcaggttcgatgatggattaccagaccgcggtgcgcggtgcattttttgatatcgccggcgtggcggagaccccggatgaggtggccgcccaggctcgctatctcgatgatggcctgttgtttctgcaggaggggaaaattatcgccctgctgccatggctggagggtgaagcctttctgcatccgctgaagggctatgtcgacctgcggggcaagctgctgttgccgggttttgtcgatacccacattcactatccgcagaccgagatgatcggcgcctttggcgaacagctgctggagtggctcaccacctacaccttcccggtggagagccagtttgccgatgcggagtatgcccaggagatagcgcagttttttgtaaatcagctgataagccatggcaccaccaccgcgctggtgttttgtaccctgcatccggcatcggtggaggcgttattcagcgaagcgctgcgcctcaatatgcgcctgatcgccgggaaagtgatgatggatcgccatgtgcccgactacctgtgcgaaaccgccggggagagctacgagcagacccgggcgttgatccgccgctggcatcagcgcggcaggctgggctatgccatcaccccgcgctttgcccccacctcgactccggcgttgctggaggcggtgcagcgcctgcgggccgagtttcccgacacctggctgcagacgcatctcagtgaaaaccgggaggagatcgcctgggttaaacagctgtggcctgagcatgcgcgctatctggatgtctatcatcactatcagctcaccggcgaacgcagcgtcttcgctcacgggatccatctcgatgatgccgagtggcaatgcctgcatgacaccgggtccgccgtcgccttctgcccgacgtcgaatctgtttctcggcagcgggctgttccgcctgcccgcctgctggcagcaccaggtgcggatgggcatcggcagcgacgtcggagccgggaccaccttcagcatgctgcggacgctgggcgaggcctacaaggtaggacaactgcagagctatcgcctgcgcgccagcgaggccttctatcacgccaccctcggcggggcgcgcgccctgcggctggaggagaaaattggcaatttccagccgggcaaagaggcggattttgtggtgattgacccggcggtcaccccgctgcagcgcctgcgcataggccgctgccatgacatttatgagcagctgttcgtgctgatgaccctgggtgatgaacgcaatatcagcgagacgtgggtgaacggcgagcgggtgtggtgtcaggattgacccgtttgagaagcggaaacaaccttcggtaagacaagaaatcagcaccaagccctaaaggatcttaaaagatccttcagggggattaggctggttaccagttaccgtaagggtagtgcttccctttgataaaatctataatatctttgtcatatccataagaaaaatcgctccttgttatatctttacaaatatctaatttattacctgatacggttttcaggactgacggagtgacgcggtaattagattcagatccacttccctgtaaccagacggccacttttccttctggagccagaccaatttgcattctgtcgtaccaggcaatacgtccccgataatccttatatttactcggcataagcatctgttccagtaccgatttagggatcgtcaaatgggtttcatacacttttttatcaataatcgagtcccagcaaaaaataatatgtcgtggagggcgctttacgtgattccagtaccctaccggcgcacggtctttgtcgttccactcgccgatcacgccaggcagatcgggtgtgctattcagcgtgttaaagcgatagtcatttccatcaacgtcaagaatagcggcaaacgtcaccacggcgggtaacgctttgggtgtgaaaaagttaaaactccactctgttggcgcatcactatgcatggcggtgttgggcaaaggttttccctgacaggcagccagcgccaataatggaagcagacaggccgcacgtattatttccatattttatttccgtccatatcgtaaacggtacgctgccagcggtcatcaggccggttggtgaatgtcaccagcttcgccggtttgaccgcaccgctgataataccccgactgtctcgtataacgctgttccagttggccgagcagtggatatatttttcggccaacatccgcaattccggtgtggtaaagcctggggcagacttaccactccttatggctcggcccatcgcaatcgctttttcacacaaaccgttcagttcttgcctaagctttaagtgtgcatttgtatctcgaataggttcaaacaccgccccggcatcctgggccgcatcgatcatcacccgcaataccacttttgaccagtcgttgaaagtcggacggttgataaccagagctgctccactgcgtttctgtagcgtgccgtaacggtcagctggcattctgtcgtcatgccaggtatcgacgctcacctctaccgcatttagcagtagagctattgccggatagccgtccatggttttaagttttgcacaggtctgccggtaaatacgcgtttccgtatccgggatggaaaaggggacggtttcaaactctggtcgggtaaggaaataagcttcattctcgttgggattatagccgccaccaatgtcggagtgcgcaccgggtagcgccagctccggccacgctggctttacgctgttcaatgcaaagttaaaacgacattcatgctgcgcggtgatgtgaaaaaccttctccgctacacctggacgtagcgccagattgacatctcctgtgtctgcgctgtgcgggttaaagccgttaaccggggtgccgatcgccgccacggtatcaaatatgcccagaaagcgggttttaccacccggtgcaccggagaattcaataccattcaaaccggctctaatcgccgtgataatgtcacggtcctgactgaatacccgattggcaaagtgccgtgccgcaccagccccgcgactgaaaccgaatatatcaaattgtatctctttgatggtgcaggaaccatcgcttgcatgctgaagtaaatattcctgaataccgacagtcagagctgcaactgccttatcggtttttctcaccacaccggtatcgcctcgaccagtacccattccgtaagtattgtcgccagctccgtcttccgtgccaataccttcaacataaatggcgtgctggcctgctccgctatcgggtcggatatcctgcctgtacaatatatacaaccagtgcacattgctataatagccaatatagctccctgcggcagtaccactatagccatgctttagtcgcacgcactgagagtacgccgttaccgcatcggcgtcattcatcccgaaatgttcgccggaacaggcggcctgacggtcaccgctattattcgcattgtttccggttccatcaaaaaacacaccgatggttagtgtgatttcccgttttttctttgcggcctgcgcacgctgttcaggctcgggctgttggttttttttcttcgccgtttccgcccgttcagctacccgcccggcattgcagtccctatcgtaggagtgagaaaagacggtcgggacgaaccgagcacgacacgggcaagagctgtagctgtccagtgagccagcccattctttcagggatccaccgacatcgtaggtgtcacccattcccccacagacgcgaaatcgcccctcgtgcttaccgcaggtcaccggatcgcccaccctgacctgttgccgctcaatgccgccaatgtggtaagtgtcatcaggcgcacccgaaagtatgcgtcccccacaggtggttttatccaggtgatacagaaagaatcccttcgccataatccctcacgaatgtaatggttataaaatcaacgcatcataccctgaagcatggctaagtcgaaattacctgtttctgattattgttaccgcgcctgaattggcccatttgcaggactatcaaaaactcattgccaggcctacaccatagcctgtggtgttattgccgaacatatagcgcgccaccagccgggtgcgggtgataaagaccgggtatttactgctgtccagctcgaggccaacccccaaggaggtcaaaccggtaaagcccagcgcccctcgctgctcgccgagaaattcagtatgcgccccctccagcacataacgcagtgggttgcccagcagcgtccagtcggctatcggcgcgcggcggcgcagatacaggccgagattctccgcgctggcctcgccctgcaccacctcggcgctactgccgaaactttgcagatgcatataggagtaacgcagttcggcatcaatatcctgggtggcagagaagcgttcgtaatccagcatcagtgccccgcccagcccccaggcgttgaaccgaccgccgtcgagaaattgcagatcggcgttggtttttcgctcaattgcccagctaccaatacgcgcatcgctggccagggtaccgagcatcacattgacgatcggccgcagcaccaggttgcctccgaggctgtcccggtgcagcgaaaaatcccaaccgacgccgccggtggtggtcagactgttccatttggtcggcacattccgcgtctgttcgccattgctgaccacaaagcgcgggtcgtaacggctgtaacccatcgtaccttcaaggtacagaggaaacgactcgctgagggttgccccgccgccaaactgggtgatggccagattatgtttgtcgttgctgccggaaccaatgttgagatcgctggcggtcacgtcagggacgacggtatagctcatcagagtcaatacggcatcggcacgctgtttgatggcgtggccgttcgccgccagcgtcgctggcgcggaaagcgaaagtaccgacaggagaacgaaaagacgcaccatatgtcgtttgccacctcagcgacaggctaacaatattgccacctaaatcagcaggctggcgttcactcagtatagtcggtgagtcaacctgcgcgtccggcggggagaaaaagcatcgggctggtcaggccgcgcctccgcggctatgcagcagttccacattttcaaaaggcatgcgcgtcacccgattacgcccatcattttttgccgcatacagcgctttatcgacgcgggaaaacagttgttcaaccgtttcgccgtcatgatgttcagccacgccgatgctgacggtcaccgacagcgtctggtattcgctaaccgcctggcggatcccctccgccagtatcagcgcgcggccgatcggcgaatggggcaaaaaaagcagaaactcttctccaccccagcgataaattttatcttcgcggtcgaccgacgtttccagaatacgagagagcaccagcaggacctcatcgcctttttgatggccgtgaatatcattaatgctcttgaaatgatcgatatcgattaacagcagacaataaccccgggggataaaagttggcgcctcaaccagacggtgaaactcccggcgattaagcaagccggttaacggatcgtgggcggcggaaaattccagctcttttttcagatgcacttcttcggtgatatcgtgaatgatgcatagcatcagtcgaatattatacagcaccaccggcccggcataagtttggacatgacgtagcgagccgtcagccagaatatgcgtaaaattaagcggtttgtgaccgccaggcagattggcaatattattcataatggggatgacgtcccggcccagggtatttatttgccaggtatgtttggtgcgcatttcctcatcggaataatgataaaaacgtagcgcggcaatattggcatcgacaatccggccatctttatgagggtcgatcaacagcatcggcgcggtattggtcataaaaaagcgagcgaaaaagccattgttacgccgctggtagcggcgggagccggtatgaatcgactgattttgcgccagcagcttcacggcttcaaacagcagcaagcaaccacagtcttcggtatcaatcagggtggttttgcaatacaccgactgcaacccattggcggtgggtaacgtccagacttcgaatatctcgctcatggtgtcgagatagcgaaggtagtgctgcagttgcgtttccggacaggtggaataaataccgttacgcatctcattgagcgacatctcgccgctcaatgtccgggaagcctgattggcatagaccaccctttcgttaaaaggatgaactacccatatcggggtgcttaagacctcaaaaacagccagctcttttaataacatacaggccccaaaccgacccactgccggcgcggaacggcacttaacgctgtgcagccccaacgctggtttaaagtgaaagcaaaatagacaccgagaaaccgcaattacgcgcgagcgcgccaagtatagtcggttatgcgcccagtaaagccctctgagggtgactttgcgcgcagtttaaccaacagaagcgatgctgcctttaataataattttatttcaacagcatagcagcaatgccagaacgggtagtcgcttttgatcacagagtgtgcatcgccaacaggggttacccggcaggcacagcggcatagtccagggcgggcagagagtcgcttttctgcccaggctaaccgtgatagtttctatcattacgctcattcatagcgacaattgccttgaaaaaaatcgccactaaagtcacccttgccgacattgcgcgtgaagcgcgcgtcggcgtagccaccgtcgaccgggtgctcaataagcgcgcggcggtgaaagagtccacggcgcggcgcgtgctggaggccgcccgccggctgggttttaccctcgagcagccccactatcgcctggctgccggcaaagcgccggtcacgatcagaatgggctttatcctgctgcaggagagccactccttctacctgccgttggcccgggcgctgacgcgcgaggctgccccatggctaccggcgggccaggcgccggtgatactgcattttgccatcgatgcggtggaagcgatggctcaggccattcaccgactcagcgatgaagtggaggtgctcggcctggtggcgctggatcacccgctgattcgccacgcggtggcccgggccgccgcccgcggcgtgcgcgtgttcaccctgctttccgatctgtcggtcccccagcgcagcgggtatatcggcctcgataatcataaagccgggcgcacagccgcctggtttatcgagcgcttatgccgggggaatggcgaaattggcattatcattggcgataatcgttttacctgccaggaaagctgtgagatcagctttcgctcctgcctgcgagaacagggcaaggggcaacagatccttgagccggttcgcagtcatgaacgggcggatatcgccaggaccgtgacggaacagatgctgactcagtacccggccctgcaggcgatctacgccccctgcggcggcgtcgaagggatcgtcgacgcgctgcgcgacagcggccgtcagcaggagatcgctctggtctgccacggtccgctcagcgacagtgaactggccctgatcgatggcaccatcgacatcatgcttaaccaccggctggatgagtttgccgccgttacgctgcgcgccatggcggacgctgcttcacgcccccatagcgaggtgatttcactccctcagcctttcgatatcatcaccaaagaaaatatgtaaattttcggctccgtctccagcggagacggttatcgggcggaccgcgccacctctcgacttgataaaaaattatcaaaaaatccatcaattaaaatcatgatgattatcataaaatcaaaattccatcattgttgataatgaaatctttattcaatactcagcggcatcccttgtatgaaaaaggaagccgacatgatacatcctatcgctaacgccccctgcagctggggcgtcgatgacccgaaaaaccctaacctccctgcctgggctaccgtgcttaaggaggcggcgcaggctggctatcgcagcattgagctcggcccctggggttatctccccaccgatccggccagcctgcgtgcggcgctggagcagcatcagctgtcgctggtcgccggcacgatctttgacgatctggtgagcgaggcccatttccccaccctggtggcgctgacccatcaaatctgccgcaatctgtcgcaggtagccgctgccgaaccgatcccgggccgccctttccagccgccctatctggtgattatcgacttcggcaaccccgaacgggcgcgctttgccgggcgcggcgcgctggctccgcgcctcaatgacaaagactggcagcgcatgatggagcacattatcgcccttagcaccctcgcctggcaggagtacggtgtgcgggcggttatccatccgcacgccgggggcagcattgaattcgcggatgagatcgagcggctggccaacgatatcccgcacgacgtcgccgggttgtgtctggacaccggacatctctattacgccgggatggatccgctcgactggctggatcgctattaccaccgcctggactatctgcacttcaaggatgtcgacccgcaggtttatcagcgcgctatccatgaaggtatcgacttcttcactgcctgcgccgaaggggtgatgtgcccgctcggcagcggcgccattgactatccggctatcaaagactttcttgcccgccgggggtatcagggctggataaccattgaacaagagcgcgacccgcgccatgccgcaggcagcctgcaggcggtcacggaaagtctgcgctatctgcgcgacgtcggattctgacaggaggcacgacatgattaacggtttaaaacctctcgaccgcaccctgcgctggggcatggtcggcggcggcggcagcagccagatcggctatattcaccgctctgcagcgctgcgcgatcacaccttcacgctgcaggccggcgcctttgatattgatgccgagcgcggacgccagttcggccaacggctgggggtggatcccgaccgctgttacgccgactatcaaagcctgttccgcagcgaggctgcccggcctgacggcattcaggcggtgtcagttgccacgccaaataacacccactatgccatctgccgggccgcgctggaggccggactgcacgtggtgtgcgaaaagccgctgtgcttcagcagcgaggaagctgacgagctggtggcgctcagccagcgacggcgcaagattatcggggtgacctacggctatgccggccaccagctgatcctgcaggcccggcagatgatcgccgacgggctgctgggtgatatccgtatcgttaatatgcagtttgcccacggttttcacgcccagccggtggaacaggaaaacgccagtacccgctggcgggtcgatccccgcttcgtcggccccagctatgtgctgggcgacctggccacccatccgctgtttctggtcgaaaccatggccccgcagctgaagatcacccggctgatgtgcgccagacaaagcttcgtcaaaagccgcgcgccgctggaagataacgcccatgtactgatggagtatgacaacggggccatcggctcactgtggagctccgccgtcaactgcggttcgatgcacgggcaaaaggtgcgaatcatcggtgaaaaagccagtctcgaatggtgggatgaacagcccaaccagctacgctacgaaatccagggcgaacccgtgcgcatcctcgagcgcggtatggactatctcgatccgctggcgcgtcaggatgatcgcatcggcggcggccatcccgagggcctgtttgaggcatggtcgaatctctatcgccgcttcgccatcgccatggatgccgccgaccgtcgcgacgaggcgctgctggccgacttctggtacccggacgcccgcgccggggcgttcggcgtccgctgggtggaaaactgcgtgcgttctgccgacaacggtgcctgctgggtcgacttccgctaactcgccggctcagggcgttcgtcctgagcctttacggctatttttctgtccgcgccagctgggttttatccgcctcatgggcgcggtccgccagcccctggaacgctccggcgccatagtattgcgcgggaaccggcaatgcctgcatatcgtgccctggatagatctgcagttcgccgaggtcgcataagcggaatcccccgacctgctccggcatggtcaggcgatacggcggcatggtttcgaatgggaccggcgtcggcagccggttttcctgtagatcgtagttacgcttcagtaccagaaacttatccggcacccgccggtgactgttccaccagtcgccgtcgatctgctgaaacatcgcttccgtctcaccgcgcgtcgccaccagcagccgggtcagcacttgtttcagcgccgcatccatggcctggttataatcctccagcgaaccgccgtggccgctgaggatgacattaatcgccagcctcgcgcccagtaaattggagtagagatcctcgggcgaaaaagcggaaatctcttcggaaaacccggggaccgactggaagccataccactgggcgatctcatgccactgggcgatttcgaaggccagatgcccggcgagccaggccgccagctgatagcgctgcctaacgcccgcctgcggcgtaaaggcattcagctgcacgcggcgcacgcccagttcttcactgtagaagatccgccccgcctggcccagcgtcggcgcaatacgattgaacagataaaaggtgttgtccgccgtatcgcgcacatgggcgatatcaataaacccgccgcggcgggtatagataagcccgttctgctcctcgctgagccccagcagatttttcaccgcaccgaacgcgctgtcgttgtaatggtgcttacccagcgtacccagagtcaacacattaccgatctggtacatcgggatcggaatgcccgccgcgcgcacgtgcaggtcgtaaccaaaagcgcagcacggtcgcagcgactccggcggcggcagctcaccgagggtgggcgccgtatggatcgccgtcacggcgggtagcaccggatcctgcgccagcgccggcagcgccagcgcgaataatagccagaaggctttacgcatcaacagcctctccacagcaataaaagtgcgcgcatcttaccggcagatagcgcctgcggttttagttaaaaacggtattcagcgccgacaacgaaactattgcgcgcgtaaaagccgctcttccgttcgtcgcggcccggtggttagtagttcttgcgcggaaaagcgctggctatcccccattaccatcatcctgcggcaaggtggcgcggtgattgtattcaaaaggtgaatgtcgtataacatagcgctaccgaggggtgtcccgtgagggctgagatggcgcaagccgaaccctttgaacctgatctgggtcatgccagcgaagggacgggtcggcaattttgccagcattaccgccattgcctgttcacacccctgcacgcccggatctcccctgaataaatggaggtcctgtgatcgttcccgcttttagccaaggtctttacggccgtttacgccagctggccgccgctgactggcagcgctatgtggcgcatcctttcgtccagcaacttgcctctgggacgctggcggaaaacgcctttcgtcgctatctgacccaggattatctgtttctgattcactttgcccgcagctacgcgctgctggtgagtaaactgcgcacgctgccggagatgcgggccgcggccgcctcgatgaatgccatcctcaacgaactgccgctgcacgtcggctactgtgcccagtgggggattagcgaaccggagatggccgcccaacctgaagcccccgaaactctcaactatacccgctatgtgctggatattggccactcgggtgacgcgctggatctgctggtcgccctgatgccctgcgtcgcgggctacgccgaaatcggtctcgacctgctgcagcatcccgccacccgactggacgataacccctacgcctcatggatccgcaactatggcgatgaaggctatctgcagggcgtcagcgccgcgctggcgctgttggaaacggtgtggcagcagcgcgggagcgaggcgcgaatcactgagctgagcgagattttcaccaccgccacccgccttgaggcgcagttctggcagatgggcctcaacgccgcggcggagacccgggcgtgacggcgccgggtattgaggtccgtggcctgagcctgcatgtcggcgaccgtcggctgttcgacaacctgtcgtttacggtccccggcgggcagtgggtgtcgctgctcggcgccagcggcgccggcaaaaccagcctgctgcgggtgatggccggtctggcgcccgccacccgcggagaagtggtcgccagcgatgggcaaccgattcagggccgtctggcgtggatggggcagaaagatctgctctacccctggctgagcgttagggacaacgtcgccctcggcgcgcggctgcgcggtgaaaaagtcgatcgtgcccgggtcgccgccctgcttgaacaggttgagctttcatcctgcgccgacgcccgcccggcgactctctccggcggcatgcgtcagcgcgccgcgctggcgcgcacgctgtatgaggatcgccccatcgtgctgatggatgagcctttctcggcgctggataccctcacccgtacgcgcattcagaccctggcggccaccctgctggccggtcgcacggtggtgcttatcacccacgatccgcaggaggcctgccggttgagccaccgcctgctggtcctctcggcggccgacggcgacattgatgatagccatcacctcgccggcacacctccgcgcgcgccggacgcgcccgatctcctgatcggccaggccgccctgctgcagcagctgatgagggcccaaccatgactggacgtctctggcgaggaggtatggtgttcggcgggctgatgcttctctggggtctggccagccgcagcggcattccccattttcttttaccctccccgctggcggtcgccgaggcgctttgggttaatcgcgcctatctcggctggcatacgcttatcacgctcagtgagatcctgagcggcctggcgctgggcgtgacgctcggcgtcaccctggcgctgggcatgatcctctccccccgtctgcagcgctggctgatgccgctggtgctcaccagtcaggcgatcccggtctttgccctcgccccgctgctggtgctgtggctgggctttggcatgagcgccaaagtggcgatggcggtgctggtgattttctttccggtgacttccgccttctttgatggcttgcggcgggtcaaccaggagtatctcgacctggcgcgcagcatgaatgcctccttcggcgctcaactgcgacatgtccgcctgatggccgccctgccggcgctgggctctggcctgcgcatggcggcggcggtggcgcccattggcgcgatcatcggcgaatgggtcggctccgccgaggggctgggctacgtcatgctcaacgccaatgcgcgactgcaaaccgatatctgcttcgccgcgctgtttattttagtactactgaccctcctgctgtggctggcggtagataccctgctacaccggctgatcgactggtcgccggaataagaatgacgtaataaaggaaaacagatgaaaaagtcgctattcgtcggggcaaccttgacggccctgttcagcggccacgcgctggccaatgaaccgctgacgctggtgctggactggtacattaatcccgaccatgcgccgattatggtggccgagcagatcggcgcctttaaggcccaggggctggacgtcaggatagtccccccttccgatcccgcgctgcctccgcgcatggtggccgcccgtcaagcggatctggccatcacctaccagccgcaggtgcacttctttgctgacgaagggttaccgctggtgcgtgtagggactctgattaattcgccgctgaatacggttatcgccctggataagcagatcaaaaccccggcagatctgcaaggcaagaaggtgggctactcggtcagcggcattgagcaggccaccctggcgaccatggcgcaacatgcggggatcgatccggccagcatcaaactggtgaacgtcaatttccagctgaccagcgccctgctggccggccaggtggacgcggttatcggcggctatcgtaatatagaagcgcaggagctgaagctgcagggcaaaacgccggtagtgatgaacgtcgaagattacggcgtgccggcctatgacgagctggtgattgtcgcccatcgcgacgcaattcatgaggcgaagatccgtaaattcctcaccgccctgcaggcgggagtgggctatctgcgcgcccatccgcagaagagctgggaggcgttcgccgccgcccacccggagcttaggaccgaactcaaccaccaggcgtggttgcaaaccgtgcccctgttcgccaccgatccggcagcgctggataaagcgcgctacgagacttacgaacagtttttatataacaataagttggtgaaaaaagttacacctttaacaaattatgcggtggaactgcattgagtcttgctatcgctgacggaaggcattccgtcagcgctttaacgtagcggcaataaaaatatagagactttctcactaataattacactttaaagggttatagtgacagagtgttgttctattataattcagcacgttacgttaattttgcccctggtaagaataacgtcaaaatagcgcaatcaataaaacgttgaatgcggatttaaaaagccatatattgtgcgcgctttatgaatgccaattcaatttcttacaccaattattcaaccagcgttcaaccgcaatgctggttgtgggagtgatatgatgacggataaagtccgtattgatactttacgtgccgatttattagacgcaaacaacgaaacctttttggcccgtcaggccgaattcgaatcgaatgtcaggagttacccgcgtaagctgccgctggctatcactaaagccgaaggcgtgtggctgacggatgcggataacaaacagtacctggactgcctcgcgggcgccggtactctcgctctgggccacaaccaccctgatgtattgcagagcatccaaagtgtcattaccagcggcttgccgttacatactctcgatcttaccaccccgttaaaagatcgcttctccgaatacctgctctcttgcctgccgggcgaagggaaagaatattgcctgcagttcaccggcccgtccggcgctgacgccgtggaagccgcgctgaagctggcgaaaaaatacaccggtcgtaccgcggtgatcagcttctccggcggctatcacgggatgacccacggcgcgctgtccgtcaccggcaacctgtcgccgaaagcggcggttaacggcatgatgccggaagtccagttcatgccttacccgcacctgtatcgttgcccgctgggcatcggcggcgaagccggcgtgaaagccctgacctactacttcgaaaacctgatcaacgatgtggagagcggcgtccgtaaaccggcggcggtgatccttgaagccgttcagggcgaaggcggtgtgaacccggcgccggtcgagtggctgcagcgcatccgcaaagtgaccgaagagcacggcattctgctgatcgtcgatgaagtgcaggctggctttgcccgtaccggtaaattcttcgccttcgagcacgccggtattcagccggacatcatcgtgatgtcgaaagcggttggcggcgggctgccgctggcggtgctgggcattaaaaagcagttcgacgcctgggaaccgggtcaccacaccggcaccttccgcggcaaccagctggcgatggccaccggcctgaccaccctgcgtcatctgcgcgacaacaagatcgccgacaaagtcgccgcccagggcgagtggctgaaaggtaaactggccgagctgcagaaacgctacccggtgattggccacgttcgcggtctcggtctgatgatcggtatcgaaatcgtcaagccgaacgaagcgcaggatcacatgggctgctacccggctgacggcgaactctctgccctgctgcagaagaaatgcttcgaagcgggcctgatcctcgagcgtggcggtcgtcacggctgcgtgctgcgcctgctgccgtccctgctgatcagcgacgcggagctggacgtgttcctcgacaaatttgaacaggccctgctggccgccggcgtaaaaccggtctgagtggagtaagtgactgccatgtccacattgaatccgattcttgctggttcagcgcagagcgttgaagcctatcagcaggttatcgagcagaccagccaggccgttgtgcagtggctgaagcaacctgagatgtatcaggggaaaagcgttgacgagctgcgtgagcgtatctccctagaatttaacgaacagggtttgggtaaccaggcggcgattgatcgtgcgatcgagtacttcctgaaagacagcctgtcggtgcatcacccgcagtgcgtggcgcacctgcactgcccgagcctggtgattagccaggcggcggaagtgctgattaacgccaccaaccagagcatggactcctgggatcagagcccgtcggcaaccattatcgagatgaagctgatcgaatggctgcgcgcccgggtcggttttccggcgggcgacgccggcgtcttcaccagcggcggcacccagagcaacctgatgggcctgatgctggcgcgcgacgccttcttcgcccgtcagggccactccatccagcaggacgggctgccgggggatatccgcaagtacaaagtcttgtgctcggaaaacgcccacttctcggtgcagaagaacatggcgctgatgggcctcggctaccgctcggtaacgctggtgaaaaccgacgaattcgcgcggatggacgtgtccgacctgcaggcgaagattgcgcaagcgcaggctaacggcgagcagatcatggcgatcgtggccaccgccggcaccaccgacgcaggcgctatcgacccgctgcgcgacatcgccggtatcgctgcggaacatcagatctggctgcacgttgacgcagcctggggcggcgccctgctgctgtctgagcagtatcgcgactaccttgacggtctggagctggtggattccgttaccttggacttccataagcagttcttccagaccatcagctgcggcgcattcctgctgaaggacgcgcgccattacgagctgatgcgttatcaggcggcctatctgaactccgagttcgatgaagaacacggcgtaccgaacctggtgtctaagtcgctgcagaccacccgtcgcttcgatgcgctgaagctgtggatgggtctggaagcgctgggccagaaacagtatgcggcgatcatcgatcacggcgtcacgatggcgaaaaacgtggcggagtacgtgaagtcgcagccgacgctggagctggtgatgcagccgcagctggcgagcgtgctgttccgttcccgtccggcgcagatggccgggagcgacgcggcggctatcgcgctgctcaaccagcgcgtcggcgacgccctgctggcctccggccgcgctaacgtcggcgtaaccgagcacaacggcgttacctgcctgaagctgactctgctgaacccggtggtgacgctggatgacgtgaaggttctgctgaacctggtggagcgcaccgctcaggagctgctggcgcaataacctgccttagcgaggcggcgcctgccgccccgctgtcagccttgcctgcaataagccgataatgtccttatcggcttttttttatttctttccgcaccgctaatgctctcttcgcagggcccgttgacccctgcctctcgcgatgccacagtactatcccgaaaataacaacgttcaggataaacgtcctgaaaatggggataatgatggagaaacgcttaccagggctggatctcgacgccctgcgcagctttgtgaccggcatggagtgcggcagtttcgcccaggcagcgctgcgcctgtcgcgttccacctccgcggtcagcgcccagcttaaaaagctggagagccagtgcggtacggcgctggtgaccaaacaggggcggcatctggtgctcaccgcggaaggcgaaaagctgttgagctacgccagacgcctgttggcgctcaatgatgaaaccctgcgcgcgctgcagggtgagcggctcaccggcgagatccaccttggtatgcaggaagattttggcgaatcgctgatgccggagatcctcgggcaatttaaacggcatcatccgcaggtgcggatagtcgccagggtggatcgcaatggtccgctgcgccaggcgctggcggaagaggcgctggatctggcgctgctgtggcaaaccgaagatcagggtcccgggctgggcctctgcccgctggcgtggattgcgcatcctgacctggatattcgcgctttgctggtctccggcgagccgctgccgctggtgatgttcgacagcccgtgcctgatgcgctcccgcgccattgcctgtctcgatgccgcggggatcccctggcaggtggtgttcgtcagccacagcctgagcggcatctgggcggcggtgcaggccgggctgggcctgacgatacgcacccgcatcggcatgccaggcaacctgcgccctgcaggaggactgctgccagcgccaggaagtctggccgtcagcctgcgacaaaccccgcgtgaggaatcgcattccgccgccgtggcgctgctcggcgaactgatgaccgaggccctgcagggatggctcgaaaggtgacagtgtcacgccatttccattcatcctcaccctaaccctctccctgaagggagagggaaccgttcggcagcatctgttaccccactccacattctgtctcccgggcaagcgcagcccagcccagcgccgttcccgcttcaatgcccggtggcggctacgccttaccgggcctacattctccctgcgcgctgatgtaggtcgggcaagcgcagcgccgcccggcaacaggcacaagagatgaacggaaccgtccggcagtcaccggcaatgggcattctgcgccattcccgcttcaatgcccggtggcggctgcgccttaccgggcctacacgcggctccgtaacgatgtaggccgggcaagcgcagcgccgcccggcaatgggcacaagagatgaacggaaccatccggcagtcaccggcaatggacattctgcgcctctcccgcttcaatgtccggtggcggctgcgccttaccgggcctacacgcggctccgtaacgatgtaggccgggcaagcgcagcgccgcccggcaatgggcacaagatatgaacgggtggatccgtccggcagccaacggcaatgggcattccgcgcctctcccgcttcaatgcccggtggcggctgcgccttaccgggcctacattctccctgcgcgctcctgtaggccgggcaagcgcagcgccgcccggcaatgggtataagggctggagggatccgtccgccagacgcctgcgccgcgggtcaggctttgctctcctgcagcagctgctggatcacctgctcctggcgggcataatccccttcgccgaatgcggtataacgcagctgtccgcgagcgtcgaaaatgtaatgcgccggccagtactgattgccgaaggcgttccagatggcgtactcattatccgccaccaccgggtaggttatccgccagtccttcaccgcctggcgcagcaggggcaacgaacgctcccagggatattccggggtatgaacgccaatcaccaccaggcccgccgcgcggtatttgttcgcccagtcgcgcacgtaaggcagggtatgctgacagttgatacactcccgggtccagaaatccaccagcaccactttgcccttcagacgctccggagttaacgccgggctgttgatccatgcgctgccccccgccagagagggcatcgcgctgctgggctgcggcgcggcgatcggctggaggctggtcttttgctccggctgcggcagacgggcggccagccgctgctccagcgcctggctcagtccaccagcgctttgcagatagcgatcgccgccgctggcgatcagcgccaccgaggccagcatggccccccctgccaaccggcgcagccgttcgccgaacgcctgtccgcgacgcaatctggcgatcaacgccgccccgcaccaccccagcaggaataacatcagcgccccgccgctgccgtaggccagcagcaagccgccggtagtcgcctgccccggatgcacaaagcccaggctaagtatcgcccccaataccggcccggcgcacggcgcccacagtaggcccaccgccagcccggccagcagagaaccgatccagccgcgctggcgtgaactggcatcgttaagctgattccccaacgctaccaggggtgaggtcagccgttgcgcgacgcgttgcgaaagcagactcagcccgaccagggcgaagaacgccagcgccagaccgcggcctgcgagggtcagattcaccacccagccgctggcgaccgtcaccagccaggagacagcgccgaacatcagcgccattcctgccagcatgatcgccagctgcccccggcggccccggacgctggcgaacagcagcgggatcaccggcagcgtacaggggctcagcagagttaacatcccgcccaaaaatgcaattaatatcgacatcgccttctcctcattatgccgtcgctgccgagagtggcagccacgacattacagcaaggccatgtaaggcgaatgtgtcgggaaagggggagaattgtcggcttagttatccgtcttccccggagatacatcaggatacaatcccgccgcggcaaggcgaacgctggcgtccaggccgccctgcgggcggttggccaggcgcagcgcgccgtccatctggctgaccagctgcgcggcgatcgccagccccaggccggtgccgccggtatcgcgattgcgcgagtcctccaggcgataaaacggctgcagcaccgcctgtagcgcggcctccgggatccccggcccctcatccagcacatgaagggtgatatcccccacggcgtcacgggtcagggttaccgtggccgtcgtaccgaatttcaaggcgttatcgataagattggtcatcacccggcgcagagcctgcggcggtacccacaccaccccggcggtctcttcgggacaaaactggaccggccggccgacatcggcataatcgcagacgatagtgtcgagaaacgcatcgagattcagccgctgtcgcgcctcctccagcggctgcgaggtgcgggcgaaggcgatgccctcccgcaccagacgggtcatattgtcgagatcctgcagcagtttgtcgcgcagttccggctggtcggccatctccacccgcagcttcattcgggttatcggggtttgcagatcgtgggagatggcggcaaggatccgcgctcgctcctgcagatgatcgtggatgcgcgcctgcatcgcgttaaacgcgcgggcggcgcgacgcacctcctccggcccctgctcggccatagttcccgccgtgtcgctggccggctccagggcatttaccgcgtgggtaaagcgggagatgggcagcaatacctggcgaaccgcgtaccaggcgcaggccagcaggaggacaaactgagcgatcagcaccaccggcagccagcgggcgatggccggtagtttcggccacaggtcgagggtcaacggcgcgccgtcgtgaagggtaatatgggcctgaatatgctgccgcgggccggggatcgccacaatacttaccggatactgcgcgctcagcgcctcctgcagggagcgcgctgcgtcccgggcgcgccagctgtccgggtaatcgccgcgctccccggcgtccagcagatagcgataattgccgcgcgccagcttcggcagccattgtgggcgctcagcggccggcaggcggtcaaggatcgccacgctggtggcgacatcggaagccagattgcccagcatcacgctgcgagcgctgctcatacgctcataaaacagcagcgacagggttaaggtattcgccagcagcagcgccagaaacagcagcgccatcagcctcgactgcagcgaggcgggccagaacctcattcatgcctctcgcgaatggagaccggcaccgacagcacatagccttcgctgcgcaccgttttaatgtaggccggctcgcgggcatcctcccgtagccgttggcgcagtcggctcaccagcaggtcaatcgaccgctcaaacagttccgcgtcgcgtccctgggtcagattgagcagctgatcgcggttcagcacccgctggggatggtcgagaaacacccgcagcagccgatactccgccccgctgagggcgacaatcgccccgctgtcgtccagcaaatggcgagcggcagtgtcgagcagccagtcgccaaaggcgatcagcctgcccgcctcggtgatctgcaggttgggcggcagcgcccgggtgcggcgtaaaatggctttgatgcgcgccagcagttcgcgggccacaaagggcttaatcagataatcgtcagcccccatttccaggccgaggatccggtcgctgtcatcggtgcgggcggtgagcatcagcaccgggatatcctgctgcgggttggcgcgcagctggcgacagagcgttaagccatcctcgcccggcatcataatatccagcacaatcaggtcaatttgatggtttttgagtaccgaccacatggctttgccgttcgccgcgccgctggcgcgatatcccgatttttccagatagtcgacaatcagttcccggatgtcgcggtcgtcgtcgacgaccaggatgtggtcaatacgctccaaaggctgctcctgcggcaaaataaactcttcacaagcataagccgtgttgccggaagcgcaacgtcgcgcctccggcaaggcgcgggttacaaacgatcggcgtccaccaccgcctgcacaaacgccgtcggatcctcctgcggcgggttatggcccaccgctcccggcagatcccggtgctcatatttaccggtaaatttggcacggtagctggcgggagccggatgcggcgcgccgttattcgccccttccagggtgatggtgggcacggttatcggcggtagcgccgccagccgttgttcatagccggcatacttcgcttcccctttctccagccccaggcgccagcggtagttgctgatggtgatcgccacatggtccgggttatccagcgcccgggcggttttggcaaaggtcgcgtcgctgaattgccactgcggcgacgcctgatgccagataaatttcgcaaagtcgtgggtgttttgccggtaaccggcctccccacgcggggtggcaaaatagaattgataccaccacgacagctcagcctgcggcggcagcggtttttcgccaatctgctgactgctgatcagatacccgctcaccgagaccagggatttcacccgctgcggccacagcgcggcgacgatatccgccgtgcgcgcgccccagtcaaaaccggccagatccgcctgcctgatgttaagggcgtccatcagatggacaatatcggccgccatcgccgacggctgaccgttacgcggcgtgctggcggagaggaaacgggtcgtgccgtagccacgcagatacggcacgatcacccggtaacccttctgcgctagagccggcgccacctgggcatagctctgaatgtcgtagggccagccgtgcagcaggatcaccggctggccgtcgcgcgggccgatatccacgtagccaatattcaggtcgccggcgcggatctgctggatcttgtcgaacgcccccgcgtcttcagcggcgcaaacggcggcggaccacagggtggataaccccagcgccacagcgctggtatagcggatcagggataatctgttcatcgttttctcaccttttatcgtcatgaagagagtacgtgaccagtaaagcggaaatttgtatccgccatgtgcccgaccggggccatttttatctcttaatgtcagcgcagcaccgcgagatacagtgtgatacaaagtcgaggttggcaattgttgcgggcatgtgaatttatgcttgccccgggagataaatccgttaccgtggcaggcatttttcaccacttaagaacgcagaaacccgctatggcgatttttgatggtcacaatgacctgctgctgaatctctggcttcaccatcgcgaggatccggtgagcgccttctttgccgggatagagaacggccatctcgactatccgcgcatgctgcaaggcggatttgctggcgggctattcgcgctattcgtgccaccgcaggaatatattgcccgtatgacgccgcaatacgccagccaacgatgggatccgatcgatatcctctggcagcaaatggccatcctgaagcaacttatcgcccactccgctggacgcttgagattgtgtctgagcgcggcggatatcgagcgctgccgcgaggataaggtactggcgatggtggcgcatattgagggtgccggaggttttgatggcgagggccgcgacctgcaggccttttatgccgccggggtccgcagcattggtccgttctggaatattgcgaaccgcttcggcagcggcgttaacggttcgtttcccggtagcccggacactgggcctggactgacagcggcaggtatcgatctgattaagcaggccaatgccttgaagatgcagattgacgtgtctcatatgaatgaaaaagcgttctgggataccgcccatcactcgacgtcaccgctggtggccacccactccaatgcccacgccctgtgcccgcagccgcgcaatctgaccgaccagcaactgcgggcgatccgcgacagcggcggcgtggtgggcgtcaatttcggcaatgctttcctgcgcgccgacggccggcgcgatagcgacacgcccttaaccaccattgtccggcatatcgactatcttattaacataatgggtgaggatcatgtggcccttggctcggattttgacggcatcaccctgccggacgagctgggcgatgtggccggcttaccgcggcttatcaatacgttgcgcgctagcggctatgatcaattggtgctggataagctgctgtggcgtaactggctacgagtattaaaaaatgtttggcaacaataggttatattgtaaacataaagttaattccctacagattccgggttgatctctctcccggtgaagcgcaatatgcggcagccgtcacagatccaccattatccgtgaggcctgtagtcatttttaagaggaacaaaacatgtggaagaaacctgcttttatcgatttacgtctcggtctggaagtgacgctgtacatttctaaccgttaatcgccccgcccgccgttcgcgcgggcaccttcattcattacccggtccgtcttcatgttcattaaagtcctcggttccgccgccggcggcggtttcccgcaatggaactgcaactgcgccaactgtcagggtctgcgcgatggcaccattcaggctgccccccgcacccagtcgtcaattatcgtcagcgacaacggtaaagagtgggtgctgtgcaacgcctcgccggatatcagccagcagattgcccatacccccgagttaaataaagccggcgtactgcgcggaacgcatatcggcggcattattctcaccgacagccagatcgaccacaccaccgggttgctgagcctgcgggaaggctgcccacatcaggtctggtgcaccccggaggttcatgaggatctctccaccggcttcccggtgtttaccatgctgcggcactggaacggcggcctggtgcatcatcccatcgctccgcagcagccttttaccgttgacgcctgtcctgatttgcagtttaccgcggtgcctatcgccagcaacgcgccgccctattcgccgtatcgcgaccggccgctgccgggtcataacgtggcgctgtttatcgaaaaccgccgcaacgggcagacgctgttctatgccccggggctgggtgagccggatgaaacccttctgccgtggctgcaaaaagcggactgtctgctgatcgatggcaccgtctggcaggatgacgagctgcaggccgccggcgtcgggcgcaataccgggcgcgatatgggccacctggcgctcggcgatgagcacgggatgatggccctgctggcctccctgccggcaaaacgcaaaattctcattcatattaataacaccaacccgatccttaacgagcagtctccccagcgccaggcgctaacgcaacaggggatcgaagtgagctgggacgggatggcaatcacccttcaggataccgcatgctgatcactgacacgctgtcgccgcaggcctttgaagaggctctgcgggctaaaggcgccttctaccatattcaccacccttaccacatcgccatgcataacggcgacgcgacccgcgagcaaattcagggctgggtggcgaaccggttttattaccagaccaccattccgctgaaagacgcggcaattatggccaactgcccggatgcgcagacccggcgcaaatgggtgcagcggatcctcgaccacgacggcagccacggcgaggacggcgggattgaagcctggctgcggctgggggaagcggtcggtttgagccgcgacgatctgctcagcgagcgtcacgtgctgcccggcgtgcgcttcgcagtggatgcctatcttaatttcgctcgtcgcgcctgctggcaggaggcggcctgcagctccctgaccgagctgttcgccccgcagatccatcagtcgcgcctcgacagctggccgcagcattatccatggatcaaagaggaaggctacttttacttccgcagtcgtctgagccaggccaatcgcgacgttgagcatggcctggcgctggcgaaggcctactgcgacagcgctgaaaaacagaaccggatgctggagatcctgcagtttaagctcgacattctgtggtcgatgctcgatgccatgaccatggcctatgccctgcagcgcccgccctatcacacggtcaccgacaaggcggcctggcacacgacccgactggtgtaatcatgcagaaaacgtccatcgttgcctttcgtcgcggctaccgactgcagtgggaagtcgcccaggagagccatgtgatcctctatccggagggtatggccaaactcaatgagaccgccgcggcgatcctcgagctggtcgatggccggcgcgacgtcgcggcgattatcgccatgcttaatgaacgtttcccggaagcaggcggcgtcgatgacgacgtcatcgagttcctgcagatcgcctgtcaacagaagtggatcacctgccgtgagccagagtaaacccaccgtcaatccgccactgtggctgctggcggagctgacctaccgctgcccgctgcagtgtccctactgttccaatccgctggacttcgcccggcaggataaggagctgaccaccgaacaatggatcgaggtctttcgccaggcgcgggcgatgggcagcgttcagctgggcttttccggcggcgagccgctgacccgtaaagatctgccggagctgatccgcgccgcgcgcgacctcgggttctataccaacctgatcacctccgggatagggctgacggagagcaaactggacgccttcagcgaggccgggctggaccatatccagattagcttccaggccagcgatgaagtgctcaacgccgcgttggccggcaacaaaaaagccttccagcagaagctggccatggccaaagccgtgaaagcgcgcgactacccgatggtgctcaacttcgttctccaccggcacaacatcgaccagctcgataaaattatcgagctgtgcattgagctggaagccgatgacgttgagctggccacctgccagttctacgggtgggcgtttcttaatcgcgaagggctgctgccgacccgggaacagatcgcccgcgccgagcaggtggtcgctgactaccggcagaaaatggccgccagcggcaacctcaccaacctgctgttcgtcaccccggactattacgaagagcggccgaaaggctgcatgggcggctggggatcgattttcctcagcgtcaccccggaaggcaccgccctgccttgccacagcgcgcgccagctgccggtggcgtttccgtcggtgctggagcagagtctggaatcgatctggtatgactcattcggcttcaatcgctaccgcgggtatgactggatgccggagccgtgccgctcctgtgatgaaaaagagaaggacttcggcggctgccgctgccaggcctttatgctgaccggcagcgccgataacgccgacccggtgtgcagcaaatccccgcatcatcacaaaatcctcgaggccaggcgcgaagcggcctgcagcgacataaaagtcagccagctgcagttccgcaaccgtacccgctcgcagctgatctaccaaacccgggacctgtaatgacgctggcgacccgcaccgtcattttgccgggcggcctgcaggccaccctggtccatcagccgcaggcggatcgcgcggctgccctggcgcgggtcgccgccggcagccaccacgaaccgtcgcgcttccctgggctggcgcacctgctggaacacctgctgttttacggcggagagcgctaccaggatgatgaccgactgatgggctgggtgcagcgccagggcggaagcgtgaatgccaccaccctggctcgccatagcgcgttctttttcgaggttgccgccgatgctctggctgatggcgtcgcgcgtctacaggagatgctgcaggccccgctgctgctcagggaagatattcagcgcgaagtggcggtgattgacgccgagtaccgcctgatccagcagcatgagccatcgcgccgggaagccgcggtgcgccacgccgccagcgcgcccgcggcgtttcgccgctttcaggtaggcagcgccgacgcgctggcgggcgatctcgctgcgctgcaggccgccttaggcgattttcaccgcacccattacgtcgcccggcgaatgcagctctggctgcagggaccgcagtcgctggaggcgctcggcgagctggcggcccgtttcgccgccgggcttgccgcaggcgagcctccgccgccggcgccgccgctgcgcctgggcgagttcactgcactgcagctggcggtctccagccagcccgcgctgtggcgctgcccgctgatcgctttaagtgacaatgtcacgttaatgcgcgagtttttgctggatgaagcccccggcagcctgatggccagcctgcgccagcgccggctggccggggatgtggcgctgaactggctgtatcaggatcggcacctcggctggctggcgctggtcttcgccagcgaccggccggaagaggtcgaccggcagataacccactggctgcaggcgctacagcaaacgacgcctgagcagcagcaacactactatcagctatcccgccgccgctttcaggcgctgtcgcctctcgatcagctgcgccagcgggcattcggctttgcccccggcgcgccgcccgccgggttcgccgatttttgcgccgccctgcaagtcgccccgtcggtcagcctggcctgtcaaaccgtttccccaggggagcctgttgccacccagggctttagcctgccgcttagccgctggcgccgccgccctgagtctgacccggcgctggcgttcgctttctatccgcaggccgctggcgatctcgttgccaaatgcccggagaaagccgcgccgctgctccacctcccgtcaccgggagatccgccgaggctcctgctgcgaccgcccttctactgctcgcccgatcaggccgaggggctggcgcgtggggaacagctgcgcccactgcttgccgccctgcgccatgccgggggacacggcgagtggcatctgttcgacggcagctggcagttgaccctccagctgccggagcccggccgacggccggaggcgatcctgcaggccatcctgcggcagctcgcgctcccggtcgcctcgctgaccccaccgccggaaagtatcgctatccgttatctcatggctcaactccccgaacggctgggtacatccgggcatcagaaaggttggctggcggccctggccggtggcagcgcagaagatgcgcagtgggtagcgcgtcagctgagcctgattaccgccccggttaatccgccgatgcccgctccggcgccctgccgccgcggcgtcgaacgtctggtttatccgggaggcgatacggcgctgctggtctttattccgctgccggatggcgcctcgctggcggccctgcggctgctggcgcagcattgtgagccgctatttttccagcgcctgcgggtggagcagcagattggctatgtggtgaactgccgctatcagcgggtcgccgatcgcgacgggctgctgatggcgctccagtccccggatcgccgcgccggggaattgctgcgctgtggtaaagactttctgcgccagctggcccccatggatgaggcaaccttcagaccgctacagcagcgcctggccgctcagatccgcgccagcaggccgccagaggcgcgggcgctgtccgccctgcgtcaggagtatggtttaccagagctaacgccgcaggcggttgacgcgctgcgcgttgcagaggtggccgatctggcacgcgaaatgacccgccggcgtcgccgctggcaggtgctgttcacgacaggggattaatggccgggggcatccggggtcagaaaggcgctgacgaagcgcgtaaggatcgccgcgccctgcgggctctcctgcacctcgtcgtgtaaccgctgcgcgtcaataccttccgcctgcagcaccgcctcccggtggcggatcagcgaacgggctatcggcgcggaaaattccgggtgaaattgcgtagagaccgcgtgcggcccatagcgcacaatctggtggagatcgtgggaggacgcggccagcaccgtggccccttccggcagacgagtcacggtttgcaaatggctcagatgcgcaggaaatgtggccggcaggccgctcagcagcggatcatcgacaccccatggcgacagcgtaatggtttggctgccgctttcccgcccgccaggatgatacgccacctcgcccccagggcatgggccatcagctgatgaccatagcaaacgccgaacagcggcatgtcgatagccaccgcctgccggatccagtcggcggtccgttcgctccacgccagacgatcggtcaccatcgcccacgagccggttagcaccgctatggtctggttatccggcgtcggcagcggttcatcttcaaacacccgcaccgtggtgagctgcgtctgccacggcgccagcagcgtgcgaaaccagcgcggcagatcgccatgcgcctggcgaatggccgtcggcggcgtgccggtctggaccagcagtaatcggttacgtgtcacctttcctcctcgctccgggtcatgttcccgtaaaacactatgccgccgggaagacgatgggacaaataaccaattactatggacgatgcgcctgcggaataagtcctgtcgcttactgggcatcggcgctatcacgctgcggcacatcggctgccgccgaagatgcctgctgcgggacaaaaatatggtccaggatggcgcgcgccgtcggtccggctaccaccccatccccgccgccgttctccagaatcagcgccatcgccaccttcggatgctgataaggggcaaacagggtgtagaagatatggtcgcgcagacgcaccgggatcattttggcgttataggtctggttttgcttcaggctaaagacctgcgaggtcccggacttcgccgcgatctgatacggcgcagtatgaaacagcttatagccggtgccgttgggctgattcgccatcccatacatgccgttgcgcacaatgccccagtacggggatttcgggtcacccacctgcggcaggttcgccggctgctgataacgttccacatggtttccctgcttcatcgaatagagcagatgcggatcctgtactttaccattgttcagcagagtggtaagcgccttcaccatctggatcggggtggcgatccagtacccctggccgatgccgaccgagatggtgtccccctgataccagggctttttatgcacccgctgtttccactcccggctgggcagcaccccggcgtactcctcattaaggtcgatgccggtggactggccgtagccgaacttgctcagccattcatggatccggtcaatgcccatctcgaaggcgacctgatagaaaaaggtgtccgctgactcttcgatggctttagtcacgttgagcatgccgtggccggttttcagccagtcgcggtagcggcgttgcgtgcccggcagcgtccacgtcggcgccccgaagaagctggtgttcggggtgatgaccccagcggagagcgccgacagcgccatatagggtttgaccgtcgaagccggaggatatagcccctgggtgacgcggttgatcagcggccggtccggattctccagcagcgatttataggcctgatagccgatacctttgacgaagggattaggatcgtagctggggctggagaccatcgccagcacgccgccatcccggggatcgaccaccaccaccgccgcgcgctgccccttcagcaccgactcaatatactgctgcaggtgcaggtcgagggtcagatagaggtttttcccggccaccggcggcacctctttcagtagacgcaccacccggccgtggttatccacctccacttcctgatagccggtggtgccgtggagcgctttttcataatagccctcgatcccctgcttaccgatattgcggtcggcggcgtagttctcctcttcgccgtttttcgccagccgctgcagatcgctgtcgttgattttcgacacatagcccaccacgtgcgccagctctgcgccgtaggggtattcccgttgttggtagctctccaccgtcacgccggggaaacggaattcgttaaccgcgaagcgcgccacctccacatcgctgaggtctgacttgagggtgaccgctttgtagcggctggtgtggtgcatatcgtcgcgaaagctggcgatgtcgcccggcgtcaggtcgacgataggcgtcagctgctgcaacagcgcggccatatcgggaattttgctcgggatcacctgcaggcgatacagggtgatattctgcaccagcggaatgccgttgcgatcgaatatcagcccgcggctgggggcgatgggcagcattttgatgtcgttctggtttgaccgggtctggtaaaaatcgtgctgctccacctgcagatggtagaggttaacgatcagcacgccaaagcagaccaccaccagcagaaaagcaattgcggcccggcggataaacagcatctcttccgcggagtggtcgcgaatttcatctctcaaaaggggcattagcggtacatcacctgaatcactggaaaagccaacggcgtaacggccgggaagcatagccttatcgcagcgtcagccctactgaaaggttgctaatgatctggcagaaatgtttcagcatgttagagggatcgttattcttaaccttgcccgtgacgcgtcaggctatattcacgatgcccgacgcgtcggcgcagctcactgttctgcgcgggccgcctcgtgggaggtagccgacttccctgaggtgtagattaagtacagcgcgagggccagacatatcaccgccgccagtctcgccggcgagaacgccatcgtgctgttgcccagccagccaaagttgtcgatcagcaggctcatcgtcagctggccaaagatcaccgccacggtggccgtagcggtgcctatccgctgcaccgccagcaccataatgacgatgtagggcacgccgcaaaaagcgcccagcagctgccacttaggcacctgtagcagatttaccgacgtcgctggagcaaaaaacaggatcagcaatcccgtcaccagcgcgccggtagcgaaggttaaaaaggcgctgcgcagcacccccacctggctgccaagacggccatttatcgccgcctggacgctaagcaatgcgccgccgcacagcgccagaatgatcactatcgtatccatttcccctccttaccccagagccaccagcagtaacgccgccataatcaacatcagcgccatggcgcgccgcggatcgattttgcgccgtgggctgccgaataacccgtaatggtcgatcgccaggcttttcgccacctgacccgccaggatgccgatcatggtcatggcaataccaatcaccggcgtcgccacggtcaagatcaccacgtaccccgcccccaacagaccgccggtgagttgccagccgggcagagaaaagaacgacgggctgctacgcgggctgaaaaagagcatcagaaaaaaggttaacactgcgccaatcccaaagatgctcatggttgcccacagatcccccacctggctcgccagcggccccagcaggccggcctcgaccgataatcccatgccgccggcaatcactaataaaatgaataataacgccattactgcgcctcctctgtacaacaggcggctgaggataaaacagcgtgctgatgcgataaacggtataatgcagaaaacactattgcaggaattgcacagatggccgatgccagcagcgtcgattttcgcgcccttcagcttttcatcgcggtttacgataaccagagtttttccgtagtggcccgccgcgaaggggtctctccctcgttgatctcgcgaaccatccagcagctggaagatgccctcgggcagcagctgttctaccgcaacacccgtgccgtggtaccgaccgaagcaggacgccttttcgcagcgtccgcccgggaactgctgggacagtacgccgacgcacaacgggcgttacaggatcgggcacaggtccccggcggactggtgcggatcaatgcgccggtctattttggtcagcgtcatatcgccccctggcttccggaactggcggcccggcatcccaaactgcagtttgacctgacgctgaccgacgattttatcgatccccatcgcgatgcgacggatatcctttttcgcatcagcagcctgccggacgcgggctatcacgccagagtgtttggcagccagcgctattacctgaccgcctccccggagtatgtttcacggtacggcagcccgacttcgccggaggcattgcatcaacatcgcacgctggtgtatggcggttcgcagggagccaaccgctggctgtttcgccagcgcgaagaggcatgggtgcactatccgttgaccccgctcatgacctcgaacaatgccgatgccctgctcacttcagccatcggcgggatggggatcgtgttatttcccgactggatggtcagcgaagcgctgcacaacgggacattagtcacgctgatggaccgctattcggcggccatcagccacacgccatcgtatatcgcggcgatttatccttatacccgccatccctctctcaacgtgcggacagtgattgactattttgccgacgtgtttggatcgccgccctactggcagcgctaatgcgagtttcgtagtaaaacttgtcatatctcaaacaattagcattccttcgcccagcttgacgcggatcgtttcctttgccgcctcgttacggctatggttactaatgaggttaatctcaatctccaggccgacacggtcccaccagggggttgcctaacccttcattgaacggaaatagctattaaatccgtagattcattcaaatatcgcttattggtagcagtgtatatcgtaacggcattcacaaaagcaaacggagcctgatatgagcacgtctaacgacccatccaacaatgcatcccccgggaagtgccctttccacgccgagacgccaaaacagagcgccggcagcggcaccgccaaccgcgactggtggccgaaccagctgcgtgtcgatctgttaaaccagcactccaatcgctccaacccgttgggtgagaattttaactacagggaagagtttaaaaagctcgattactccgcgctgaaggctgatctcagagcgctgctgaccgattcgcaagagtggtggccggcagactggggtagctatattggcttgtttattcgtatggcctggcacggcgccggcacctaccgcaccgttgacggtcgcggcggcgcaggtcgtggacagcagcgctttgctcccctgaactcctggcctgacaacgtcagcctcgataaggcccgccgtctgctgtggccggtgaaacagaaatatggccagaaaatctcctgggccgacctttacatgctggcgggtaacgtcgctctggaaaacgccggcttccgcacctttggctttggcgccggtcgcgaagacgtctgggaaccggatctcgacgtcgactggggcgatgagaaagagtggctggcccaccgtcatccggaaagcctggcgaaacaggccatcggcgctaccgaaatgggtctgatttatgtcaacccggaaggtccgaacgccagcggcgagccgctgtccgccgcggcggccattcgcgccaccttcggcaatatggcgatggacgatgaagagatcgtcgcgctgatcgccggcggccatacgctgggcaaaacccacggcgccgcagaaaccagccacgtcggcgccgagccagaagccgcgccgctggaagcgcagggtctgggctggcactccagctacggcagcggcgcaggcgcggacgccatcacctccggtctggaagtggtctggacgcagacgcccacccagtggagcaactactttttcgaaaacctgttcaaatacgaatgggtgcagacccgcagcccggctggcgcgatccagttcgaagccaaagacgcgccggagattatcccggatccgtttaacccggagaaaaagcgcaaaccgaccatgctggtcaccgacctgaccctgcgcttcgacccggagtttgaaaaaatctcccgccgcttcctcaacgatccgcaggcctttaacgaggcgttcgcccgggcgtggttcaagctgacccaccgtgatatggggccaaaatcccgttacctcgggccggaagtgccgaaagaagatctgatttggcaggatccgctgccggcagcgacccatcagccgagcgcggaagatatcgccagcctgaaaaccgccatcgccggcgccggcctgtcggtcagtgagctggtctcggtcgcctgggcgtccgcctccaccttccgcggcggcgataaacgcggcggcgctaacggcgcgcgtctggcgctggccccgcagaaagactggccggttaacgccatcgccagccgggtgctgccgaccctgcaggcgatccagcgcgcctccggcaaagcgtcgctggccgatattatcgtgctggccggcgtggtcggcgttgagcaggcggccgctgccgccggcgtcagcgtcaatgtgccgtttaccccaggccgcgtcgacgctctgcctgagcagaccgacgtcgagtcgtttgatctgctgcagccgctggcggatggcttccgcaactatcgccgtatcgaaggcggtgtctcgacggaaaccctgctgatcgataaagcgcagcagctgacgctaaccgccccggaaatgaccgtgctggtcggtggcttgcgcgtactgggcgcgaactacgacggcagcaaacacggggtgtttaccgaccgcgtcggcgtgctcagcaatgacttcttcgttaatctgcttgatatggctaccgtctggaaagcggccgatgataacgcggagctgtttaccggcagcgaccgtaaaaccggcgaagcgaagtacagcgccacccgcgtggatctggtgtttggctccaactcggtactgcgcgccctggcggaagtgtacgcctgcgccgacgggcagcagaagctggtgcatgacttcgttgccgcctggacaaaggtgatgaacctcgaccgcttcgatctttaatcctctcgccccggctcccgccggggcgtttttcttataccgcccgcggcagctgttgcaggcgactccgcgttcgttgaatatcctccagttccacccctgccaccagcgtctccaggtcgcagcgggtcaccagcagcaggcggatctgcttttcatacagcacatcaatcacattgataaagcgctgctgggccgccggccccaccgtagccaatggcggcacctcgtccagtagccagacggcatagctttcgcagagcgtcagatagtccatcaccgccgtggcggcctgacaaagctgggtaaaggtgaagtgcagcaacgcgggcgacgccgcggccgccagcagcgtgcgatagcctaccgtcagcgaaaccggttcgccaggcagcgacggcaggtcatacagctgacgctgttgtgcattcggattaacccacatccgcccgctgcagaaggcgttatcctggctaagatgccgtacgcgataatcctcctcgccgttcagcgccaccaccgttagatgggcgcggatcagcgcgatcgacggtaaaaagcgatcgtgatatagcggattgggcagcagcatctccggtgggtagtttgaggtggccagcagcacgataccgtgttgaaagaggtgttccagcaaggctttaatcagcatggcgtcgcctgggtcgtgtagatgaaattcgtcgaagcatagcaggcggcaaccggatgtcatctgcctcatcaccgtctgcaggtcgggcgctcagggggcattcagccgctggtgcagttcgcggaagaagtgatgaaaatggacccgccgcctggcggcgagcggcaggctggcgaaaaagtggtcgaggataaagcttttccctcgcccggtacgtccccagacgtacaccccctgcggcctgcctgtcgtggacaccaactgctgaccgagggcgtcaaggcgggcgatgagtgacagctgatcgtcgtccagcgtcagacgcgcccgcgccgcctgctcggccatcacgcgggtaaaacgaaaatcagccgtcacctctgtgggaccagattccgagggtacacatccattttttaacattcttataacctcctgcaaggaggccattctagccgctttcccgcgggatggcgaatcgcgcgacgagcggccatttccgctgctccgccgccagcccctacgcctctccgacacgccagtgcaccgatgtgacgttctgctgaacgcccatctgtgccataatttgcgccagcgttttttggtgctgcttatggctaatcagctgcgcgcaaatctccagatggtccgcggtgtccgccgccgccgactgcaatccctgcagggtaaaccgctgctgctgcgcaatattcagcaacagctgacgcacggcattttcatgttcgcgcagacaggtgacgcgtaagacatagcgtttctcttcgtcaccggcccccggcaaggcatgaatgcgctgcgccgcctcgcgcagcaggatattggcgcacagaataatcagcgtagccgccgtcgcgttccagaactgtcccaggccgcagagtacgccgatcccggccgaacaccacagcgtggcggcggtattgaggccgcggacgttcatgccatcacgcataatcacccctgccccaaggaagccgataccggagacgatctgcgctgcaatacgccccgggctgtccggcgaggccgacatcgcgctgagaataaacaccgccgcgccggtggccaccagggcattggtgcgtaaaccggccatacgttgtcgccactgtctttccgcgccgatcagcgcccccaacaacattgccgcgagtaaatgtgtcatataaggaaataccatcgcgccttcctccagaaaacagaaagccaaaaattacagatgtagcgctcagccgcgccgggcgattagccggtggatgatggtggaggaaataagggtctggaaaacataaacataacgctgcctctcgcgctcaatggcgcataaattattgagggaggcaatccggaactgagagattgctgcccgccgggacggcaagcagcgaaatgatcgcgttagcttgccggaaaatcgcaataagggtgactgtccaacgtatgactcctgaataaaagtgggcacattatagcccggggtaatgatgggtaaagcacgaaaacgccgccggtgacgattcgtttagtttgtctttcgcgggtcctgcgtagcgtgacatcgccaggcgactaaaatgccgtcagcggtgatttacttcaattccgtcgctgggatgcggcgaaaaccagcatgaatatcaactttatgtctccccagcgcgatcttacgctaaagaatgtcgctaaggctaaggattaaaaatttaaaactattaacaatcaattaacattagcaggcaaaccattcttcctgaggaacacaacaccatgtctaccacccaggttctcggcgaaacgccctatgcttcgccaggacaaccgcacgccagcttaaccggacgcattgatgcgctgcccgcctcatttgggttatggtcgtttattaccctgctctcacttggcggcttctttgagctctacgatctcttccagaccgggtatatcagcgcgggcctgctggcggagggcattttccacaccggacaggcgggcatcttcggcatcgccgaccaggcggccttcgcctccgccacctttatgggactgtttatcggcgccagtctgctggcgccgctggcggacaaactgggccgccgcctgacctttatggtggcgctcgcctggtacggtcttttttcgctgctgatggcgacgcagagtagcgcggaaggggtgatcttcttccgctttctggtggggatcggcctcggcattgagctggtgaccattgatacttacctcagcgaatgggtgccaacccatctgcgcaataaagcctttgcctttgccttcttcatccagttcctctcggttccggcggtggcgctgatgtcctggatgctggtgccgaccaccctgttcggcctcagcggctggcgctgggtgatcatctttggcgcactgttctcgctggcgatctggtttatccgtaaaaagctaccggagtcagcccgctggctggaaagcaaagggaggcatgatgacgcgcatacggtgatgtgtgagatggaagcccgctgcggcctgacgccgtcgccaaagcatgcgcatgcggcacagagcgtcgtcaaacgcggcaccttccgcgaaatctgggcgccgcagtatcggcagcgcaccctgatgctgatggtgatgaacttcttccaggcgatcggtttcttcggctttggcaactggctgccggcgctgctctccggtcagggcgccagcatcacccatagcctgctgtacgccttctttatcaccctcgcctatccgctgggctgtctgttctgcacccgcttcgtgcatcgctttgaaaacaagtggcagattgtcctctccgcgctgatgaccgttatcttcggcaccctgttcgctctgcaaaacagcccgattctgctggtgatctgcgggtttatgatcacctggtccaacgcctggctgaccatcagctaccacgcctaccaggccgaggtcttcccgacccatattcgcgcccgcgccgtcggcttctgctactcgttcagccggctctcgaccgcggtgaccagcattctgatcggcattattctgcaatacgccggcacgccgggagtaattagctttatcgtcgtcagtatgctgatggtgatgctgtcggtggggatcttcggcccgagaacgcggggcattcgtctggagaatatctgatggcggtcgccgccgagggtgccggcggcgacatattttatcagttgcgatgttgcagctggcgctgaacctcaataagctccgcgatcaactcccgcgcgagcatagaggtcattatatgatcctgggcatgtaccagaataagattaaccggtactttgccacagccctcatccataccaataagcatggtttgtacatcatgcgcgcgttttgcggaatctgcggcgtcctgcatcagcctatcaacgtcctgccacactccttttctggcggcttgcagcgcctgcatcgccagactgcgggactcaccggcgttaatgatgagttccatgacggttgcttccatatccatacggtttccctacttgttgagtgaaggttcatccagcagcgccagcgccgcagcaagaattttatcgccacgcatcatgccgtaatccatgctatcgataacggcgactctcttacccaccgcagcggcctttttgttaaattcttcgaatttatatttaatctgcggccctaaaagacagcaatcgtaatttggtaacgtgcgatcaaaatcatccattgaaacagcaataatatcgacagcaatgccttgcgccgcggccgcttgtttcattttattcattaccatgctcgttgacatgccggcagcgcagcacaaaaatatttttttcatcttatttatctgttcctgtaacgtattattgatgcttatctttgagattttggtctaaaaaattaataataatttttgatacttcaggctgataccacatcaaacctgcgtgatccgcccctttcaccacgtaatgggtggacggtatttttttcgctaccagcgcctcgtgtaaaagcgttgactggctgggtgaaaccacattgtcggcatcgccgttcattagcagaaaaggcggcgttttattcgaaatccaggtgatgggattagcccgtttcgccttttcgggataggcggagatcgcgccaccgccttgccagggaataccattaaccagcatcgcctctggtatggccggtgactgatgcgctttttgaatgtccgcggaaaagtcagccccgactttcgtcagatcggacaggccatagagatcaaccaccgcctgcacatcgctgctttgatttgaatactctccctggtcgaattccttatggccgctggtggtacccaccatggcggctaaatacccacccgccgactcgcccatcacagcgatatggttgggatcgatgcctaatttttcagcattggcgcgtaaaaatctgaccgccgttttcgcatcttcaaccatgcccgggaaagtcacattgggtacgacccgataggtaatgctggcgacgacgtaaccggcccgggcaatatcgacccgctgaccgataaattttgatttgggcgcatcaagaaagccgccgccggtaataaatactactgcaggtaacggtttatcagcataaggcttgagcaaatccatcgttaactggagcggtcgtcccatgatattttgcgtaaatgaataggcaatatcaggcaccatctcgacggccagagcgctgggtttaataacgatagttttgctgtctgttaaaggtgtttgtgcaaaagcagacggaataataagcatcgtcagcatagcagcgacgtgtttgttcatagggtaatatcctgtagtgatgtagtaatgattcagaaccagacttccattcgatacccgactcgccactccgagtcttccggcaataacgtgacctctttgtccccgcctgcgtaggtaaccgtcaaactgagaatcggcgcgacatacggtaaaacatccagttgcagggccgggccggcggcaattttgtagccgacgccgctggcaccttcgacgccatttttattgatagtgttattcaccatgacttcatacaacatggagagattttggtgatgaatattttgtttaacgtttacgccggtaaagatcccggtttcatttgcggaaccataggtcatgtccccccctgaataacctgtatcaggtataaaggtggttcggtcagcagttttttcacgcttggtatattcatagatgaaagccggcgagacggcaaaatcatcaaataacgtcaagtttccgtcggtggaaaaacgcattgaacaatcgccctcttcgctaaggacggtaatacgactggtgttcagataaggagcaataacccctttaccatactgtaatttgactgtcgattgtccctttgccactccccaaaaagacggcatgctgtatttcgcggaaaaactaattgctttctgcttgccagtgcccaatgggtcatcaatttctttaacataggtcatacccagctctgtctgatcgatacgataagccatatcaacgatgcgccgcgagccttctatcgcctgcggcgcggtatcgctggaccagtcgatctggtcggtaccaacgttcagatcaaaattcttactgttataaccgaggccggaatcaatatgtacttctttggtattgtaagcgaagatattaatacgttgatcgaggtaacgacgcccagcccaaatgtttgcgccttcgggaagaaaagagagcccaccaaagcgcccataattctgtgccgtttctaccgttttatcgccgtaacccaccatttcataggtgtaatcagcccattgctcgggagaagccagcccctgccattttttagtaatagccagcgatgtccagtaatcgtgccagaaactgtttcccaaatcgcccattttgccacgaggatcctgattaggcccggtgggatcggtatgcaacgacatgtttttgggacggtttagttcgctctgaaaatctccagccaccatgccatatccatttaactggaagctgccgtcgtcgcttagattggccgcatggcataaggtcgcaggcagaaaacatgagataacacctgaaataataattctggggttcattcttcagactccatcgggtaagagatataaaatnnnnnnnnnnnnnnnnnnnnnnnnnnnnnnnnnnnnnnnnnnnnnnnnnnnnnnnnnnnnnnnnnnnnnnnnnnnnnnnnnnnnnnnnnnnnnnnnnnnnnnnnnnnnnnnnnnnnnnnnnnnnnnnnnnnnnnnnnnnnnnnnnnnnnnnnnnnnnnnnnnnnnnnnnnnnnnnnnnnnnnnnnnnnnnnnnnnnnnnnnnnnnnnnnnnnnnnnnnnnnnnnnnnnnnnnnnnnnnnnnnnnatattaataacatcaataatagagtgattagtatgcttaaggagatggatcaacacatccaggcgtttttcaaccaacaaatcgctaaagttcttaccagtgaagtcttttatcagtttactcaccttataattcggctgatttaaacgacaggagatctctttcaggctggcagttttataatcggtatcaatatatctcaacacggccatggcaagtgattcattgtaactgccgttgatatggtaatcgctggcttgcacattcgagagcagttcggtcatcaacagtcccaccaggaaattgacgcgtatctcttttaagtggttattactgtagatctcgctaatgatgacatgcataatgttttgaattgcgtcgatttctcccactttaaagtgaatatgctctccatgtttttttctgccattaattgctgaaaggataaaacgggaaatgatgttattttcgtcaaaaagggacatgagtcgaccgaaaaattcggtcttaataataaaattgatgataatatcattctgcnnnnnnnnnnnnnnnnnnnnnnnnnnnnnnnnnnnnnnnnnnnnnntctcccccttacctaaagtgagactttcttcattaatcttctgatgcattttaccctgatatatataaataagctcgataaagccatgagaatgcaacggaattttagtaaatcgggtctgcttttcaatatggatgtagttgtctttgaaaaaccttcgctccatatggcttttgaatttatgacacagttgatagttagcgcgaagcagttcgagttctctatcggtataagccagtagcttttcatgaatatcatggtgtaacataaaagtacctaactggagcgaacgtttgggtatgcactatcattacaatagtacttttatctcacctgcatcggtaatgtcataaaagtgatgataggtatcacagtctatcggcgcaggtaattgtttattaagttgatacacttttggtaatttaagagtgcattttttgaggttaaatggcactttgatgactaattctatgccttttttatagcgccgccagcgacactcaatacgccctctgatggtttgatgccagcaatccacaaagttaatcgtgtcagtaaaggatggactgattaaaataacatcagcaccaaccgcctcctcagcgacggtaatgccgcccaaagcctgaaacagccaactggaataagaactgaacatcgcatgattattcgaaccattcaggttatcaccgaaaaattccttcaatgtgctggcatcatttttaagcattttcttgaatccggcttcgactcttaaccattcaaggattaattcattatgaccatagcgatgaaatatttcataggcaaaactttggccaaaaatcccacaagtgataacattttgctcttttttgatgagatcgatcaatgcattcaatgaactctcgatatcatcacacaaatcgaagtagattgcaaaaacaaagctggtctgactgcgatcggcaaagctgccatccgtattcttatagagtgataaaattttctctctaattttattggccttgccaatatattttagccatttttctttaaagccaagatcatcacatatttttgcgataattaacaaatgataataatagaaacaagcactggtgaaatggagagctggcgagccatttttgtaattacgcatatcatgaacgcggcttccccagtcacccaggcagcaggtcaccaggtcatcaaagtcgcgcatttccagggagaggatctgcttctcaagaaatggcaagctttcggccagcagattgacattgccataatgtcgatagtgaatggctatcaaataaggtaataccagttgccagcccagggggcccgtttccccgccgactccattagtcttaattcccataaatggcgcagtttccgtcacaccaccacagggacgaatatcattgataaaatcaaagatagttttcttatacatagcggcagagtcaaactgatacacttgcgaccgggccaacgcgacaatgtctccgccataggcaaaacgttcgcgggcacaatccccgaagaccgaatgaatgttattcagtttngttcttttagcaacctcaaagagcttatttatgtaaggatctgagcagtaaaagcccccgttttcccttagtacagtatgtactgaaagcgcctgaacgttgtttaattgttcaatattaataccgcttaactgcacatagcgaaacgaatgacaggtaaaggcattgataaaatgattcttcccactgcggcattcaaaggcatccttctgttccgccctcgccggtgctccaattccgccgtcaataatcacaccttcagtaacctgtttgccgacaaatcccgcaagggtggagtcagtgtttagttcgtagttttcatcaacgtcttcgctatagagcagttccacacgttgattctcagacgcggtaatggataaatcgataaatccggtgacgatggcaccgaaatcaataatgaatgtctcttcgtctacgacgtggatatgctctgccccgagggacaacgtatggttaattttcggaataaagctcgagaccagacggccttcaggcccgttgctcagcaccacatttttccagtcaggcatcagcaaatcggtggtgttgtctccgcgaaacagtttcatatccaggcgctcgcccaaatagatattattgaaggtataagcgccttcgcaatattgccagtcggcatcactaccgatgatcatttcgcgatctgcaaacctcatataaatgtcagcgatgacctgtggttcaccgatggttaaggtctctctcaggttatatttaccaaataatttaagcggtgctggattaaaccagccatcggctagctcaacaatgacttcatttttcggctgattaataaacggctttatattgtaagtatcataataaataattttagcataatttgtccagtcagtattgagctcaccgcgtgtgacctctttaccgttgatatacaatttataaaaaccaagaccaacaatactgatataggcatcgargaggtcttcgtcgagataaattgtttttctcatcaccacattacgtttaccgcgatagtaatgaatatcattagtgaagtgatacccaccgctcacccagcggccagaaaaatggccaagattactggttgtgaaactgtttctaaaaacgttgttctcaccattgtcaccgtgggtaaggacttctatggtataagaagtaaagctttgtaacgatattgcatcgagagtgacaattgtattattaccctctcttgcgataagagataccagttcggcacctttatacacttttatcgaaaatgacttttgaggataattggtagaccagcacaccataattggcagatgatcgacaataatgttttccgtttggtaattgatacttaacatctttcccaccatggctaaattggcgttgctggcatttttttaaggagcattcaaatggtatccgtctgattttcttcccggcaagcgacaagatcggcagtcttgaagaagaaataccatcctgcaaatcgcgcaaaaagtcctataaattggaaagcggcaattttccagctcccctgcataaaaccagaaataatgatcggcatgccggccggggtactcaccccagcgacgcgaggcaatacgccaatgaccgttagataccatgcaatgccgagcatgatgccattgataaaaatataaggaatcgccagagtaaaattcattaccagcggcacgccataagccatcggttcgccaatggtgaagatagctggcggcaaggcgatcttaccgagcgttttatagcgtgcgctcttcgcgaaaaaagcgagcattatagccagcggcaataaatctccagcagcgccataagtcataaagaacgcaaagccggtgatgttgggtaagtcgacgcctgcagcatacgcagcaagctgctgggcatccatggcaaaccagatcggcgctacgataccgagggtgatagcgtggccatgcagcccaaaaaaccatagcaattgcgcaacaacagcaacaaagatgagtgaccagattccggatccaagtgatgttagcggaacctggattaatttataaataatttcgtgaatgctcccataaccaacgctggtaawgactgcggagataattgtaaacagcgtcaggatggcgattcctggaatcaatgaagagaacgatttggagataaattcagggacattttctggcattttgataatcaaccccttgcgagttatcgccacgaatattcgtgttgaaattatcgccaccagaatggcggtaaacagccccatgggccccagccattggccagggattgaaaatgattgccctaacggccctatttcaccgagatcatacggcgttaaaataaagaaagagatcattgaaatcaggcctgacatgaagccatcaacatcgaaatttttcgctagcgtataggcaacggagaaagcgacaatcacggctaaaaaattattcgtgaaggtaatcgggatatcaaagaagcgagttaagttgtgtcgtaacaaaaaatcctgatatggagcaaacggaaacactttaaccaaagtcgccacagaactcatgatcgttactggcaatatgagcatcataccgctcatgattgacttaaggtaggtattttgaccaatactttgcatcagttgcaaagccttttcttgtacaatgttggtatgagatgacatgtaaacagtccgtaatattattagttttcagacatattcatttaagaattcatatgccggcatgacattaatgcatcataatctaaccaggaagtcagcctaatatatcattagggagtaatacatatcggttgttgttaacttaaatgacggctgttgccatagttaatatttgtgatgtgtactgcaggagggataaaaaattgtcattaaggcttgtaacttctggacagcattaagcggcgccgcaataccgcttttaccaacggtccagcatcaccggggctatattgacactctcccatcagaggggcgtttaggcattttagtgacaagccgccaggtcggcggcccggcctcagccaaatatcccctgcgcctcggcgaagcatttttccgccagggtcgagactggttcctgctggcgcataatcagcgccagctgtgaatcaacatgggtttcggcgatcggcagaatttcaagattatcgcttagcgcttcgaggccgttgttaagcggcataatggcgcagcagatccccgcctgcaccgcctggataatctgaaacgtcgaatcactttcaaagacataccttggcgttagccctttggccttaaagctgatttcaatcgattcccggtaatacatccccttggtcagaaagccgaggggcagcgtcgccagcgtctcccatcccggcgtcccggcgctgaagtcgaaatggcgtttatcgtgcagcagtcccatccgggtttgcggcaagcgagcaatcttgaactgaccttcatccagatgctgcagataacagatccccagatccagctgattacggctgacgccatcgataatctgctccgaggtcatcgacaacaggctgaactgcagcgccggatatttctccgccaggggtttaatcaactgcatcggattgaggctcgccagcggcaccataccgacccgcagctggccgaccatctgcccgcgacagatggccgcctctgccgccaggccgtcatgagcggccagcaccgcccgcgcccaggccaggatccgctctccctccggggtaaacccctcaaagcgttggccgcgctggatcagcgtcaggttcagctcctcttccaggttacgaatgcgcatagagagcgtcggctgggtaatatgacaggccgccgccgcctggccaaaatggcgcgtctgatcgagcgcgatcaaatacttgagttgcttaatatccattctctttcccgtttgaaccccgccgttcacccccggggccgcgcacaggttaccagaatgttagtttcgctagcgataaattcaagcgaggacaccacgaggtgctgcggggcgcagggcggcgcgacgccgctctgcgctatacctttttagcgcccgccggccagtggacggatctctttcgagcgcagcgtcaggcgaacgggaaccgacttatacgaaggggtgccgctctcttcatcgagatagttcagcggcaccagcacgttggcttccggataataggcgccgacggtgcccggtgcaatgccgtaggccaccaccgtgatatcttccagcgtcagcgcgcttcccggcagcgcggtatggatatccacccgatcgccatgctccagaccctgggcggccatatcctgctcgttcataaacagcacgtcgcggcggccaaagacgccacggtagcggtcatccatcgcgtagatggtggtgttgtactggtcatgactgcgcagcgtcaccaggcgcatcacgtcctcaccctccaccaccacgttctcatgcacccctttaaataccgagaacatggctttaccggtggcggtaggccagatgcgctcggtcggcggcagcggcatgcggaagcctccaggatggcgaatgcgctggttataatcctcgaacccaggaatggtctgttcgatcagatcgcgaatgcgatcgtagtcttccacgaggtactgccagtccactttgctggccggcaaggtggccttcgccagaccggcgacaatcgccggctccgagcgcagcatcggcgaggcgggcttaagcttgcccgacgaagcatgcaccatcgacatcgaatcctcgacggtgatcgactgccggccgctggcctgcaggtcaagctcggtgcggcccagacacggcagaataaaggtctctttcgccgtcaggagatgtgagcggttgagcttggtgccgacgtgaacgctgagctcaaggccgcgcatcgccgggaaggcgcgttcgtggtccggcatcgccacggcgaagttgcccccaaggcagatcagcgctttggcttcgccggcgatcatggcctccagggcttttaccgcatcgtggccatgatgccgcggcggcgtaatccccatcacccgctgcaggctgtcgaggaaagccgcggagggtttttcgctaatcccgacagtgcggttaccctggacgttcgagtgaccgcgcaaaggacagatcccggcccccggcttgccgatattgccgcgcatcagcagcaggtcggcaatcagacgcacgttggaggtgcctttgttatgctgggtgatgcccataccgtaggtgacgatggtggccctggatttggcgtaagccgccgcaacctgggtcagggattcgcgcgtcaggccagactcctgttcgatgtcctgccagcgggtggcgtggaggtcatcggcgaaggcggtgaatccctgggtatgttgggcaataaacgcgtggtcgagcacattgccctgctcctcctccagctgcagcagcgctttggcgatccctttcaacgccgccgcgtcgccgccggcccgtacctggtagtaggtcgaggcgatcggcgtcgagcgccgggtcgccatctccattacgttctgcggatcggcaaaacgctccagcgcccgttcacgcagcggattgaaaacgataatcggcacgccgcggcgggatagctcatgcagggtgcccatcatccgcgggtggttggtgcccggattatggccgatggagatcaccagctcggtctggtcaaaatcgtcgagggagacggtgcctttaccaatgccgatcgactgtggcaggcccacgctggtggattcatgacacatgttggagcaatcggggaagttgttagtgccatactcgcgggcaaacagctggaacagccacgccgcttcgttggaggctcggccagaggtgtagaattcaacctcatccggctgcaggccgcggaggatctcgccgatacgggcgaaggcttgctcccacgccaccgggcgcagggtatcgctgtcccggtcgtaaaccaaaggatgggttaagcggccgtagccctccagttcaaaatcgctttttgccagcagggaagatacggtatttgccgcgaggaatgcgggcgtcacccgtttggtggtcgcctcccaggtcacggctttggcgccgttttcgcaaaactggaaggtcgatttatgttctttatccggccaggcgcagcccgggcagtcaaaaccgtccggctggttggtacgcagcagcgtggcgggcgcctcaaaggcatccatctgggtgcgcacggcgatggccgtggccttcaacgcgccccacccgcctgccggaccgtcataggggtgaacaccgggaaccgcgcgtcttttattggtcatctctttactcctgctgctctgttctggctgtcgctagccgaaaaaggcgtacaacaaccccggcgacgaagcgtgaatcgcatggcgtcacctgaaaagaatgctgtttctcaaggatagtacgatgggaaagcgtaggtactgcgtttgttaactgaataataacatacaccacaattctgtataattgatgttatctatcaggtgttaaatttaacttatttgcaaattttgcggttttcaccgcggtgctgtgacggataaattgctacggaaagtgatgaccgggcagcgaaaccgcccggtgggccaggctcaggtcagattgaagtaacgatccggacgcagcgtctccggcagcggatgctgaccggtcatgtcgagcagattgcgctcgatggtattgcacatcgcgttcagcggcaggtcattggctgcggtgccgaacggatcttccagctcttccgccagcgaatcccacgataaaaaggtgtaagagataaagaccgagacaaacggcgtcatgtagtgcagatcgccgaccagggcgaacggcagcagcgtacagaacaggtagacggtacgctgcaggatcagggtataggcgaaaggcaccggggtggtggccagcctttcacaaccgcccagcacgtgcgccagctcgtcgagtttgttgtccatcagcccgtaagtgatgtcgctgagcttgcccgcctcccgcagctggccaatttcgttgccggccagcagcaggatccggttggtgggcattgagctggcgaggatctccgtcaccctctcctccggtagcaaccgccgcaggtcagccgtcggatcggttttgcgcagctggtgcttcaggctccagctaaaggccaccagatagctgacgatgcggcgatgggcatcgtgttccgccggcaggatattgcgcagctgacgcaccagcgtgcgttcggcgataagcaccgtcccccacagattgcgcgcctcgacgaagcggctgtagctggcgctgttgcgaaagccgaggaaaatcgcaatcgcaatccccagcaggctgaacggcgccacggttaagtggatccccaactgttcgtaccattgatagctgataatggcgatgatcgacatcagcacatttagcagcaggcgaaagatgattttcgacagcacggagccgtgccagtcaaataggcgaagaaaccagtgttgttctggccgaatgatcattgtctgacttcctgaattaccgctctggtcattatctctgaatacagaatagagattatctatgagccgattggtttattttatcgttaactgcgatgggcagatctgcgccattatttagcgatggtaatggcgtttttagtatgggccttttttatatttcaggcaatcaatgcgccagcaataatggctcagaagaaaaaataaccgctgagccaattcatttttccgcttaggctaccgggtgtatcagaccgctttcgtcaacccctgcgcttcgcagggatcgagatgcaccatcacattaagcaccggatgctgcgccagcacccgctcccgcgcgtgacgggcaatctgatgcccttcggctaccgacatctcgccagccacctcgagatggacatccaccagcaccagatcccccgccttacgggttttcagatcgtggaggcccgccacgcccggcgtagttcgcagcgtatcggcgatcgcctgctgcatctcttcatcaaccgcacggtccattaaatcatgcagcgcgctgacggcgaaacgatagcccatgcgcgcaatcagcagccccaccgccagcgcggcgagcgggtcgaaccaggcgaacccggccagattaccgataatccccagggccaccaccagggaggatgcggcgtcagagcgggcatgccaggcattggcgataagcagcgacgaattcagccgcctggcggccgccagcatatagcgaaacagcccctccttgacggccagcgccaccagcgccatccacagcgccgcgctgtgcaccggcggaatagtttgcggttgcgcgagatggcccgccgcggaccatagcatgccacccccgacgagcagcagcatcgcgccgatgattagggaggcgccgttctcatagcgccagtggccatagtggtgatcgtggtcagacggtcgacggctctttttattcgccatcaataccacgccatcggcgaccagatcggaaaaagagtgcattccgtcggcaattaatccctgagagccggaaaatattcccacgactacctgtaaggcagaaaggaaaatattaaccaccacgctaacaagggtactctttcgcgcctgcaccgaacgctcatgatatttattatcattttcaaaattatgttgtgtcattatttctctccctttgtgagcgggaagaataaactgacaaactgagtttatgcttaacaatataaaagccattgccttgccgtttaacgatatcgcggcggtcggtaatgactatttactgtatgtgccgttggaacgctgcaaccttgcgcctatgaactatcttttgaagggtggccacaggtcgggccactttagcttagccaccacaggagtcagcgatgtcacataacaaaccatcccggctgcgtttcgccattaatctgggcaatgcggtcctggcccatctcggggagacaggaaagcccgcgggcatcaccgtcgagctcagccatcggctggcgacgcgctggggcgtcagcgccgaattcgttccctatcctgccgcgggtaaagtggtggctgacgccggtggcgagcactgggatattgcctttctggccatcgatccggcgcgggaagccaccctgcgctttacctcgccctatatcaccatccagggcaccgcgctggtctgcgttgattcgccctgccagagcgtggccgacatggatcgcccggcaaccaccattaacgtcggacaaaacgccgcatacgatctatggctaacccgccatctgcagcacgccagcctgcatcgccttccctcttcgcaggaggcaatcgacgccttcctcgccggtgaaggggatatggtcgccggcatccgccagccgctggaggcgacagcccgtcagcacgccggggtgcgggtactggcggataattttaccgagatccagcaggccatctgcgtcgcccgggcggacgtggaccgttttcacgcggtaaacgacgcgcttagcgagtggcgggcggatggcagtctgcaggcgctgattgccggtcacctgggccaagcgaactgaatcacgcctccgtcatccggcgcatggcgcaatgccaggcgccgttgcgtaccgaggcgcgcagtacgcgggccacgccatgcaccatcaggcgcgtcgtgcgccgctgcagcggcgtgagcgacaatcccagcatctcctgcgcccattccggcaaaaggtcaattcctgcgttcatcatcacccggccgaccggctggctcatccgccccggcagacgggtggagagcagcacctgagctacctcccgggtacgttcgtcgcagcgcagtcgcgggcgcatcgcctcgagatagtccgccacctcctgcggtgtctgagggatatcccgagcccccagccgccgggcgatttccgccgactcacgaaaatagtcctcctggcgctcgggactgaccaccgtccgcttgtagcgcaggtgggaggccataaagcaactgcactcggcgacgtgcacccaggttaacagcgccgggtcgctcgcctgatacggggttccgtccttatccaccccggcgatccgctgatggatcccctgtactttggcgattagccgttcggcgtcgggggtagtggcaaaagtggtggcagaaataaactggctggtgcggcgcaggcgacccaaaatatcctcgcgaaaacgagagtgatcccagacgccggccagcgccagaggatgcagcatctgcagcaacagcgcgctaatgccgccgcagagcatcgaggtaaaatcgccgtgcacctgccagatggccgactggggaccaaacagccccggctctcctttgggtcgttcaaagtcgatctcttttagcgccatgccggtcaggccgagcacctgcgcctcgatcatccggcgaatgccgatcatgatggtatcccttacgtgcaactaaaggacaaaagataccactgttggacagcattgggagagatattgcggaaagagtgcccgcagcacgcgggcacgacggcttacggattcagctggtaatcgagggtaatgttggccttcagcacctgcgataccgggcagcctgctttcgctttctggatgatctcatcgaacgccgccggagacacgtccggcaggacgatctggctttgcagcgcgatatcggtaatcgcaaagccgccgtcggttttattgagggtgaccactgcggtagtgtcaatggacgttgcggtatatccctcttcgctgagcatcagcgacagggccatcgaaaagcaggcggcatgtgcagcgccgatcagctcctcagggttggtgcccttcacccctcaaaacgggtgttaaatccgtagggctgctggctcagcgccccgctttctgtcgacacggtgcctttgccatgcttcaggtcgccttcccagtgcgctagccctttcttatgaatcgccatttgattcctcctgtagtgatgtcgaacaaaaagtatagtgcgtgatgccgaagctgcgtctttttgcagcctctggcccccacgttcccctggttttcgtgtcgttggtgaggcagggtgacgctatcggccatcctgcggatgccagggatcggatttgtcatccttgctgtcgtcccgtttacgcggaacttcgccctgctctccgggcgcctcacgggcaggttgcttaccgcgctcttcgtcttgcgagtgagaaaaggtgctcatatcgacgtgctccgcttacttaggcgactgcttgagcagacgatcgattcgcacgaccggcggcgtcattttgcgatccagactgccgttgatattgaccagatcgtctggctctacgtgttgttcgttaaacgcggcgaccgggataataacggtgatggtgccgcttttatcacgaaactgataacggtcatctccctgccgcttgagcagattgccgcgcagcgaaacggtcgcgccatcgtgcatggttttcgcctgctcaacggtcatgatccggccatcctcgacgccgcgatagccgtcatcgagtttgtgcggcggcggcggcgcggcatcctgagtaaaccctcccttatcgtccgcctgcgcgacacctacggcaaacagacaggccatggccaatgctagttttttcatcatgcctccgttttttgctgacgatgagaataaagcctggctgaggctggccatttttacaaagtcaattgttctgatatcgtctaatataagaatgtccttatcgttacgctcctggcgaaacgaaacgcggggaaaatattaatgattaagaatcaacagccttgtcctatcgtcgatgagaatgaacgctccttacgctttgaatatcgcttccgccgctatgggataattgttttgagtctcatcattcttaccgcgttaagcggcctgtggtcctccggttatttcagtgaagcacaccgggaaaccagtggaggcgaattaagcgtcgattatcagcgctatgccaggctgatgagtgaaaccgagtttaatattcagattaaaccggatacggccagcgacaccattatcagcttcgccgccccgttattaacccgctaccagatcggtgatatccgtccgcagccggataaaatgtatagcgccgacgggaaattacatctcgtctatcagcggtcgaaccccccttcaccgatatctgtgtggttagccgttaccccaaaaacggccggtaatatctctctgcaggcggtagttaacgatcgctattctgtaacctggcagcagtttgtctatccgtaggagtcgctatggaaatggtccttagagccgcagcaatctatctgatcctgttgattatttttaagattgccggcagaagaaccctgatgcaattaaccaactttgacctgatactgttgctgattatcagcgaagccacccagcaggcgatgctcagcacagactattcggttaccgggtcgatgctgactatcgttaccctggttagtattgatattttgttcggctatattaagaaaaaatttgctcaggcagaaaattttctcgatggtacgccggttatcgtggtggaaaatggtgctgtcatcgacgagaagattaagctcgtcaatatctctgtcgatgatatcctgctggcggccaggcagcaccatggcatttatgaattgaaagcgatcaaattcgctattctcgagcgtaacggccagatatccattattcctgagcaggaatagtatcggcttcgctatttatcacgctccggttgtttatcacctgattccggagcgcgagtggcgtcatcctcttctttttcaccgttaacaacgttcaacattaacatttttcctcctcgctggttgtcagggatcctacaaattatagaacgccttcgccgaagtatgcaggatctgccgaaactaaccaggagatgccgcctgattcacattgcgcttattccaggatatttcccacctcgtcattgccattggtgagaaataattaaccgatccgtacagtcaatattgtgaaagccaaaacataatgaggtcactatgtctgtgatggttattaccggtggaaccgcgggagcgggcaaagctaccgcgctgcgtttcgcccgcgctggatatcacgtggcgctgatcgcccgagacgaaacgggtttacaggagacgcgacaggcctgtgaacggtttggcattaaaacgctggctattagcgccgatgtcgtcgatgccggggcgctgcagcgcgccgccgccgaggtggaaaccaccctcggggcaatcgacgtctggatcaacaacgccatgaccaccgtgctggcgccctttcgtcagatgagcgaggaggagtttcgccgggtgacggaggtgacctatctcgggtacgtgaacggcacccgcgcggcgctggaggtcatgatcccccgggatcggggggtgattattcaggccggctcggcgctggcctggcgttcaatcccactgcagtcggcttactgcggagcgaaagcggcgatccgcggctttaccgatgccgtgcgaaccgaactgatgcatgagaaaagccacatccagttgaccatggtgcaactgccggggatgaacaccgcccagtttggctgggcgcgaaacaaaatggatcaggccatgcagccggtgcccccggtctatcagccggaagtcgccgccgaggctatttacagcgtcatccagcgcccggtcaacgagctgtgggtcggaaaaagcaccatccagtcgatcctcggccaggtcttcttccctcgcctgctcgatcggctgatggtgaaaaaagcgtgggagggacagtttaccggtcagccaaagtcgtcagaccaacaggacgacctgttcacgccggtgcgcggcaatcatccgggccacggcccctttaacgatggcgcacggcgtaaagcagtcaccatcagcgccgatctcccgggtaaagtcgccgccggcgtcggggtagcggtggcgacgatggcgctgcgggcgttgttccgtcgttccggaaaacggcgctaactcaggctgcggctgaaccaacggtaaccatacccggagagtgccagccgcgcatctttcccgccgtgcagcccatcctgatagagcttatcttccagaattgggctccagtagccctcggccagcggcgggagcaggacctctaccgcctgctggctgcagttggccagcatcagtacctcccgcgattcgctgcgatagagtaagcccagcaccgcgtcgggctttagggtaaggagagtaaaagggagggatcccggttcagtatattccgtgcgcgccaataccatattgcgtacccgatgcagcagcgacctgggatggcgcagcgccgtttctacattgatccgttggtagcggaaccgcccgctggccaccggttttaccggcaaatcatcccgcgccgcccgggaaaagccggcgttggccgcggccgaccactgcatcggcgttctgaccgcgtagcgctccggtaaggagagatcgtcacccatgccaatctcgtcgccatagcgcatcaccggcacgccgggcagcgccagcaggatagcatgggctaacgctatgcgtcgggtatcgccgtccagcatcggcgccagtcttcggcgtacgccgcgctggtaaacggacatcgatttatcaggggcaaaggtgcggataacctggcgcttgttgcgctcgccaatcccctcaagatccagttcatcatggttgcgcagccagttgacgaagcagcacccgtccggcggggtcaccatcgcctgcagggccttcaccaccggcgcggcgcgctgctgcgccaggctgaggtagaggtatttgttaagccagaaattaagcaccatctgcagccgatcgccctggccgaaataatgacggtaatcttctaccgcgacgtccacttcacccaggagtatcgcatcgggattgaggcgctgtacaacctgccggagatgggtcagcagcgggtagccgcgcgtctcgtcgccctttccggcctgcttgaccagatgtgacgcggcatcgagacgaaagccagacaccccagcctgcagccagaaggtgataatgttttcgatttcagcgatcaccggcggatgggcgagattcaggtcgggctcgtggtgataaaacatgtggcgataatattgcccagcctgttcgtcccagcgccagacgctctcctcaacgccgggaaacatgggaggatcgtcgttttccggcggccgatcggcccacagataatacggccgccacggcgaccggggatcgcgtcgcgccgcctggaaccacgggtgctgcgcggaggtgtgctggatcaccagctcaacgatcacccgcagtcccagctcgcgggcgcgggcaatcagctcaatcacgtcagcgatagtgccgaaccgcggatcgggctgcagatgatcgctgatatcatagccatcatcctgcagaggagtgagatagaacggagtcagccagagcaccgtcgctccgaggctgcgaatgtagtgtagcttttggcgaatgcccgcgagatcgccaaaaccatcgccattggcatcataaaagagcgaactgtcaacctgatagatgaccgctctgtgaaaccactcttcccgttgcatcactctcacctcgcgttctgcccgtccctgtcagccgcctcagcgcgatccggaccccgccctggccttcgcgcgcggtttgccgacaggcgatacgggattgcgttccgctggtagcatcctgttcgctaccgcgtccaccagcgcctgctgcctggcggttaataccagcggaacctgttcctcggcggcgaggagcgcgatggtttgccgtttgaccatagcgttctccggcggcttaatgcccggcctcaacgccaggcatatcggtatccataagatattgcccggtcagcgctggcagataatggagcagccaatcagccattcctctctcttcagccaggataccctccagtgtatgcatcgcgctgtggtcgcctactcttttcgccgccgttaataaagcggtatagcaggcgacctcaaaatgggcaaaaacgtaggcagtgataatcactttaataacctcatcaccgggcagcatgatgccaatggtctgtcctaacgccgccacccggctcatcgcatccttcagcgcggagcgggaaatatggttgcgggcgatgatatcctgcagggcggacaattgccgtcgggtttcatagagatgttgttcaaggcgggtgcgtaactgcggttcattatcgaggcgtctgatggtggccaccagcagcgactcagcctgtttttccatggcatgcgcatcgcgaagccagttgtgataattttcgatatccgtcatatacacctctgatcattaaccttttattttgacgtggaatcttcactctcttccgccgcctggtcagctcgcgctgcgctatatccggataaatggccaacaatattggcataaatactgatgagaatgacccacagtacgctgtctttccaccagattaacgagggtatcgccagacccacccacataacggcggcgacaagatgacagcgcttaataaacactggcgtcaacttcattttattaccttaggaccgaacaatattgagcgaccattttatcgacgctctgaccgctgcgtcaggcgctaaaccttacgctgaaaatgtctttcttttgcctaagcataaaaaagaaaacagcgttgcgtattgtcccgttccgttattttctgtctttaccgtccggcaaatttattgccgctgcggccgtctttaattgctagtgatgcggcgacttcctcctcaccttttagtttccccacatcgcggataatgaatgtcgttatagataaataaaccctgaatatgcagaaacctgcggaccatctggcccacaggttttgtctcaacgccgatttgtcggcgtcacagctcatcagtcgctagctgtcaccggatttacggccgccgccatgactgttcttaccacccttcttaccggcttcggatgcacgttcaggatcatttttaaagttcccgccgctgtgctgtccgcctttacgcccggcttcggatgctttctcacgatcttctgcaaaattacctgaaccgcctctatgctctgccataattttcacctttggtttgatcaatatcggttggtaaatggaaaatgaccctgttacaaatcatcgccctcgatatctaacactagaggaatgcctgcaggagtcaaattaatttcagatacccatccgcgcactgacaaaataaagctttactaacgaagcggtaagataaaatatacctcacacaactcctttatttgacgtaggttatgttcaccggcgggtaaaacagaaacgtccaacggccgtttgtaaaaaaatgcaaacgatttaatgaataaatatttctttatctcgcggaacacaatacccagaaatattacccccaaagaggtatcaccttataggacatggtttgcgaatgaacatcttcatcgtttattcaggcagcaccttcatcgtaacttgagaaaaagatcatgcgcgttacgaaaatagcccttggcccttgattaaggatggaataatcctaatttaacgtcagcaataataacgcaacgctatcccccgaaatacgccaaggatcagtcggttaaggcataccgttacgcctacggttggccattgactgcgatgttgcgagtcatccagggtctgtcgccaggagaagctgacctattcttagagctggcccgttctgtctgaaggagatgactatgcaagatgaaaaaccgccaatgaagaagttacccacctccatgttgccagaagagacggctccacgtccggagttcccggagcaagaacaaaccccgccgggtctggatgcggaaatggagccatccccggaccacggtgaaaccagctacaccggctccgggcgactggccggtaagaaagcgttaattaccggcggcgactccggtattggccgtgcggtggcgatcgcctttgcccgcgaaggcgccgacgtcgcgataaactatctgcccgaagagcaaaaggatgcggatgaagttatcgccctgatcaaagccgaagggcgcaccgcggtcgccctcccgggtgatattcgctccgaatccttctgccagtcgctggtggccgacgcggtggaacagctgggaggtctgagcatcctggttaataacgccgggcgtcagcaatactgtgaaacccttgaggaactcactaccgaagatttcgacgctacctttaaaaccaacgtctacgcgccgttctggatcacccgcgccgcactgcctcacctccaggccggaagcgcgattatcaataccacctcggtgcaggcgtataaacccagcccgatcctgctcgattatgcgcagaccaaagcctgtctcgcgatcttcactaaatcgctggctaaacaggtggcgaaacgaggcattcgcgtgaacgccgtagcgcctggcccttactggacggtgctgcaatccagcggcggccagccggacgagaaggtgaaacagtttggcaaagacacgccgatggggcgcccgggacaaccggtagagatcgccccgctgtatgtcaccctggcatccgatgcctgctcatatacctccggacaggtgtggtgctctgacggcggggatggtgtggtctaagcctcccggcataccgacgcgcgccagcgcgcgccggtattttcccggccaacccttgcggctatatactggcccctcgcctcccggttgcggcaattttttctttcctccactccgttactctggccgcatgctatgatgtccgcccgccgctgtgcgctaaccctggccccgacgccacccctgaggacgacagatgagtaatgacatccccctgaaattttatgacatcgtggacgaatacgagaccgaagcggctgcgccggtaaaggatgaagaacgcgatgcgctggcgcgctatttccaactgctgattgcgcggttaactaataacgaagagattgacgaagaggcgcagcgagaaatggcccgcgaggcggccattaacgaagaccgcattgacgatatcgctaatttccttaatcagtggggcaacgaataaagctcaacgtcagcctaccggcggaattgccttccgccggtgctgtcggggcgcgaagcgccaagactcagccgtggccagtctcctctcccagacgcctctgcagcgcatcaagaaatagcggtaatccgtgaggttggtagtcgcgggaaagatagatgccgtaaacgctcaacgccttcggcgtccactccggaagcaccacctccagcgtgccgctggcaatcgcgccccgggcctccagttcgggaagcatcgcaatgccgcacccggcaaccgccgcctccagcagcaatgaagatatccctgcgctcagattaccgttcaccgccaccgacgcttcccgcccctgcgcatcgctgaactgccagtgctggctggcgaaatggctgtatagcaggcagttatgtcgttgcagatcgtcgggcgtcgtcaacgggccatgctggcgcatccagcgcggcgcggcgcagagcagcgaacggcacactccgaggcgacgagcgatggcccccgcctccgggttgtcggtaatgcgaatggccacgtcgatacgctcgccgatcaggctgaccggatggttattgatatccagctccaggcgcagcagtggatagcgggcgagaaagtccggcagcagcggagagatcagctgcatggcggtaaagtgcgcgcaggcgacgcgcagtgtgccgctgggatcggcccgctgacgctcgccggcgatttcatcggcgatccgcgtcaaaccgcgggtcttgagcaataccttctccccggccggggtcagcgtcagccgccgggttgagcgatggatcagccgggcgccggcccagctctccatttgttccagatagcggctcaccatcgggcgcgacatccccagcgcccgcgccgcggcgctaagacttcccagctcgcagatgcgcagatacacctgcgcagcaatcaccctgtccatcactccccctgatctgcacgttttatgaaactcagcatctcttgtttcaggaattctatcaaatagcgaaatccgtacaatggaacgcattcacctgttactgagaataaatcatgaaattatctgcccttgctgttgctaccgccctgttcagcggcgcggtcttcgcggcgcctctgacgctgcaaacttacaacccgcaggaaaaaggactttttgccgtcaactcgaccctcgtttccggtccgcatgaagcggtacttttcgacgcgcagttcagcgtcaaagatggggaaaagctggtggagatgatcaagaaaaacggcaaaccgctatcgcggattgtgatcacctctggcgatccggatttctattttggtcttgagccgctggtaaaagccttcccgcaggcggaggtggtcgccacgccggaggtcgtcaaacatattgcagccaccaaagcggccaaactggcgtactggggcccgcaaatgaaagacggcgcgccgacgcaggtgtatgtcccgcaggcgctggaggccaacagctttaccatcgatggcgagaaagtgaccatcatgcagccgcatgactacgcggcgttcgtctggatccgggcgaacaaaacgatcctcggcggcaccggcgtggcgtggggtatgcatctctggaccgccgacacccagacgccggccagtcgtcagcaatggcgtaatacgctggaccagatgatcgccctgcacccgcagcgggtgatcccgggccattatctcggcaccccgccggagggagacagcgcggtgcgctttacaaaaacttatctccagcagttcgagcaggcgctgaagacgcattcggattcggccggggtgatcaaggcgatggaggcacagtggccgggcctggcggagaccagctcgctggagttaagcgccaaagttaataccggtgagatgaagtggtgacccctgcggcgcgcaaggaggactgttcttaatctggctacccagggttgctattaccgagaaaatggaccaccctacctgtggccgcacaaaaaacgcgcggccgactttgggttacatttcatccggtcattaccgggtttgcccttgaaaccagaacaggataaaggagtcagaatgaaatcgaaccatcaggcacgtcatcttctcggtctgaactataagctttcccggcagaaaaaagtggtgctggaaggcgatgaagaaaccaccatcaaccacatccatgctaccggccgcaaacgccgcggtggttaattttcagcctgagtgataataaacaacaccgtcctgttgccaggatggtgtttttttatggcaattgactgcttgtttacccgcttgaagaccttctgctctatactctgcccgctgctttccacccgcccttcgcttatcgccgcgccgggactgtggtcatgatcaaggagttagtgcgatgcaatttacccataagaaaaaccgttccctgtacatcccctacgcgggtcccgttctgcttgaattccccctgctcaacaagggaagcgccttcagtatggaagagcgcagcaatttcaatctgctcggcctgctgccggaagtggttgaaactatcgaagagcaagcggaacgcgcctggatccagtatcagggattcaaaactgaaatcgacaaacatatttatctgcgtaacatccaggacaccaacgaaaccctgttttatcgcctgatcggcaaccaccttgaagagatgatgccggttatctataccccgacggtaggcgcggcctgcgaacggttctccgagatctatcgtcgcgcccgcggcgtctttatctcctaccagaatcgccataaccttgacgacatcctgcaaaacgtcccgaaccacaacgtgaaagtgattgtggtcaccgatggcgagcgcattctcggcctcggcgaccaggggatcggcggaatggggatcccgatcggtaaactgtcgctgtacaccacctgcggcggcatcagcccggcttacaccctgcctatcgtgctggacgtcggaacaaacaaccagcagctgctcgacgatccgctgtatatgggctggcgccatccacgcattaccgacgacgagtactatcagttcgttgacgacgtgatccaggcgattaaggcccgctggccggacgtgctgctgcagtttgaagattttgcgcaaaagaacgccatgccgctgctcaaccgctaccgcaatgaaatctgctcgtttaacgacgatattcagggcaccgcggcggtgaccgtcgggacgctgatcgccgccagccgcggcgccggaagccagctgagcgagcaaaaaatcgtctttctcggcgcgggttcggccggctgcggtatcgctgaacagattatcgcccagatcgtccgcgaaggactcagtgaagaagaggcccgccagcgcgtgtttatggttgaccgcttcggcctgttaaccgacggcatgcctaatctgctaccgttccagaacaagctggtgcaaaagcgtgagcagctgcagagctgggataccaccagcgaggcgctgtccctgctggacgtagtgcgcaacgtgaagccgaacatcctgatcggcgtctcgggtcagccgggactgttcacggaagagattatccgcgagatgcacaagcactgcccgcggccgatcgtgatgccgctctccaacccaacctcacgggtggaagcgacgccgcagaatatcctgagctggaccgacggcgaggcgctggtcgccaccggcagcccattctccccggttaccgtgaaaggcaagcagtatcccatcgcccagtgcaataactcctatatcttcccgggtattggactgggggtgatcgcctccggcgcgtcgcgggtcaccgacgagatgctgatggctgccagcgaaaccctggcgcagcactcgccgctggtcaacaacggcgaaggtccggtgctgccggagctgaaggatatccagaccgtctcacgggcaattgccttcgcggtcggcaaggtggcccaggagcaaggcgtggcggtgaaaacctccgccgaagcgctgctgcaagcgatcagcgataatttctggttaccggaatatcgcaattatcgccgcacctcgatttaatcactgtcaccgggtcgacatatcggcccggttattaataacgtcagaataatacctcccgccacagaaacgtttttttcgcccatattcattcatcgtaagaatataaaacggatagcatttgccgcgcgccctccgctgtgcaaaatagttgtttctcaccccctcacaacggaatgtgaaatgctaaaattaacccctggcgcgaataaagcgaatgcgattctgatccgtattgtcttgtttcttatcggcggtatcgccatcatcaccggaatgtgcctcttcagcggtgatatgtggatgctcaccccgcgggcggaacagtatcagcccgccactggcgatctggtggatgtcgtcatctatgaaccgagtaaatttttcttcgctctgctctacgtgtttattattaccctggtctggctactggcggtacgtaaaatcccctggcggccgatacagcatcctatattaccgctgatggtactgattgccgccgggatatttattttcctccacccggaggtcaccccgggtcgggatgccagtgttcagtacggtaaacacaatacctattatgcgtccatattctggatgaaaacccggtcaggtagtcattccgctaagcaatcaaaatatgaaacctttgttgaagcgaaagatccccgctggcttatcgacagaaacaatcttcgccgcgcctggcgctgtgaagtgcagcggcatacccagttttacaccctgtcattcaatgagggctggttcccgaacggcgatccgcaggtccttgccaaccagtgtagtcagattgccgatctggatacggtctctgaagacgagctgcttgtcactaaaaccatcaggagccgtaaatgagccagcaaaaaatggttttgcagccgatattacgcctctggctggggctgtttagcggactgttgctggtgagcgccatcagcgcctttcacggtgagtactggtatttcggcgataagcaggcgttttacgcggcgaaagccggcgaggtctctgtgcatgaactctatacgccggcgaaaatcctctttgcttttatcgtcagcacgatcccgccgctgctgtggctgctgctggttaaccgtcgggcgccgcggctgctgacccacactctcccatcggtgttactcctgctggcgggtttgctgtttttcttcctgagacccgacgtgattcccggcggggaaacccctgtctatcgctacggcgagcgggagcgctactaccagacgatacgctggcagaaaccggagcctggcgcgtggcggggtacccgctctgagtacaacgtgtatatcgaatatcgtgatcccaggggatatcgcaaagtcgacaatattaaaaacgcctatacctgtgaaacccaccgggagtctcgcttttttaccttaacgaccgaagaggattggtatccggattcgtatccgaatattctcgaggctccctgccaggcgataaaggatccccaggcgatgacggaatatacccgcgaccacgcccgctggtttcccattacgttttagcaaacacactagccttttgcgccaacaatatctcgccggtaatggcactgaacacgaaaactggtgggtatcggcccctgccagttttgtcactggcgcgctttccctttccccactacactgccatcacccatccacttactgaataaaaaaggaggccccccatgctgtattgtgaaatgtttattgtttcacatgccttaggcaattgcgccagctcaagcgttatcggtatcgtgctgcgataactatggcttgagcgaagacccttcacgcaatcccttctctccggcttaccgggttatcgtcagcgagttttgacgaggcatttgcatgcctgtaactcttgagtaagttgactatgagtacattactaactgcccatgcgctccacgtggagacggcttttgggccgctgtttaactccctctccttcaccctgaagaaaggcgaccggatcggtctcatcggccataacggttgcggcaaaagcaccctgctgcaggtgctggacggcaccctcgcgcccacctcgggcagcgtctcgcttgccggtcagtgtctgatggcccgcgttgaacagcatctgccggaggcgctgcatacgcagtcgctgctgcaggcggtgctggccccattacccgctgatgtacgggaagcgcagcgctggctggccgaacgcctgctggcgcagatgggctttaccccggcggtgatggagcagcagaccgccaccctgagcggcggccagcacacgcgtctgctgctggcccgggcgctgatccgccagcctgatctgctcttgttggatgagcctggcaaccatctcgatctgcccaccctgctgtggctggaaagcttcctgcaaacctggcaggggagcttcgtactggtgtcacacgacaacaccttactgggtgctgtaactaatgcgagttggatcctccgtgaccagacgctacattgcttcgccttgccctgcagcgctgcccgtcaggcactgcaggagcaggatgaaagcgccgcgttacgtcataaggcggagcaaaaagagatcgaccgggtcagcgccagcgcccggcggctggccacctggggtcgggtctatgacaatgaagatctcgcccgcaaagccaaacagatggagaagcaggtcgcccgtctgaaagacgagcagaccgagctcagcgtcggcccgccgtggcgcctggtgttacagggggacgccctgccggccgaccgccttttggagatggacacccttcccgtctcgcccgcgccgggtcagccatccctcttcaccaccggcgtggcgcgcctgcgcagcggcgatcgcgtggccatcatgggacgtaatggcggcggcaaatcgtccctgctgcgcctgctgtggcagcagatgaacaacgcatcgcctctcccggggctgcgcctgcatccccggttgcaccccggctactatgaccagacgctggcgcagttgccggacgaggccagcctgctcgaggccctgacgccgtttgccccgtcggcggacacccgtaaacgggcgctgatcgccgccgggtttggctgggcgagacatagccagaaggtcagcaccctcagcggcggcgagcgatcgcggctgctgttcgttggcctgtcgctggcgcgctacagtctgctgctgctggatgaacccaccaaccatcttgatatggagggtaaagcggcgctggcgcagacgctgcgcgattaccccggcggcgtgctgctggtcagtcatgaccgccagctgattagcgaaagctgtaaccgcttctggctgattgacagcgccgggctaacggagtggcacagcctggaggaggtctatgcccgtctgcaggccgtggcgcccgccccggacagtcggctcgctttgcagagtacacccgccggggctgacgatgatgaggaggcgctgctggcgcggctgattgacctggagcagtggctggctgacgacatggcccgcaagccaaaacatcaaaagccgtcactgcaggcacagtggcaagaggagattgaccgcctgcttaaccaactgacgtaatctccatgtcccccaccggctaaggcgccacgcccttagccggtgtttccggaccgggtaaactgctgctcggtcattacctttccccactgctccccctgccattcgcggattaacgtgaagccaaaggattcatacagtttgcgggccgcgtccagccctttaaaggtccacagctgcaccgcgctaaactggcgactatcgcagaaagccatcgcctcgctgaggagccgcctgccaatgccggttccccggcagctctcatcgagaatgaaccagcgcaaatgcgcctcctgctggccgaggtcctcgccatcgatagccagcgagccgacgattttcccttcgcggatcgccagccagatctggttggccggggaggagagccgggtggcaaattccgctacgccgctggcgaccttgccttcaaaaaaagcgccaaagtcatgatgacgggcgtaatactccccgtgcatctgggctatccggccgatcatccccggctggtagccggtcatcagcgaaatttgcggagccgtatccgcgagcgcgctatcccgacactgcgccagcgcccgggcataggccgccagtccagtggcgacagtttgctgctgcgtctcatccagatggtctaacgccttcaccacctgacgggtaccccaggcgttaattttcgccaccgtatcgtgcccctttgccgtcagggcgagtgatttcgcgcgcgcatcctccgcgcaaggacgctcctccagctcaccagccgccagcagacgagagaccatccggctgacgcttgatttttccagtcccagcaacgtgaccagctgcgcggccgtcatctccccctcatcgatacctcaagcagggtgtgcaccgccgaaggtgaataatgggtggcggccagcgtggtgctcataaagcccagctcgcgcaccattaaccgcgaggcggtacgaatctgttggattaagggggtatcaggcatggcggcgggtccagaaaatgaaatggttgtacaatacaaccatcgccttcatcctgcgtcaagatgcaatatggtgggataagcgttgtcgtgtgacgtgtgacgtgtgacgtgtgattttgccgccatagggatcgtgaaagcgaatgccgcgggcgccggacagcgcccgcgatgaatattattgcgagttcttcgccttccaggcctcccaggccgatttgatctcctgcttcgcggccgcggcgtcattaaagccggccagctcgacctttttacgcccctccggcagttctttatagacccggaagaaggcctccagccgctgctgttctattttcggcagatcggagatggtcttgatgtcgtcgtaggtcgggtcaattttactggccggtacggcgatgattttgtcgtctttctcaccgccgtctatcatcttcagcacaccaattgcccgcagcttaatcagcgtgcccggggccatcggcgcgcgggtataaaacaccacgtccagcgggtcgccatccccggccagcgactgggtcagcgagccgtagttcgccgggtaggccaccggcatcgactgaaagcggtcggcgacgataaaccccgttttagcatcggtttcgtacttaatgatcccgcccgtcgggatctcagtgacggcgtaaaattcttccgggttgttttccggctggggaaattccagcacattgtgggcctgggcggcggcggacaaaagcagaccggcggtgaggatggtttttaccagatgcattgttgtatcactctgttgttataagaaattgatgcgcaaaacaatagattcgagtgatgacaaaaacatgaccattcagcgtcaatattattacctaccaaatatagcgatattgtctgaattttgtgctatctctgtagcaaaaagccacattctgtactaagcgccttgtattttaccactcagcgtctaatccttattgggtactattgcattaattaagttaatcaattcccccacaaggagacaggcatgaaggcagctgttgttacccacgaccatcaggttaacgtcacggaaaaaacgctgcgcccgctggaaaacggcgaagcgctgttgaaaatggaatgctgcggcgtgtgtcatactgacctgcacgtgaaaaacggcgattttggcgataaaaccggcgtcattctcggccatgaagggatcggggtggtacaaaaagtcggcccgggcgtcacctccctgaagccgggcgaccgcgccagcgtggcgtggttcttcgaaggctgcggccactgcgattactgtaacagcggcaacgagacgctctgccgctcggtgaaaaacgccggctataccgtcgatggcggcatggcggaagagtgcatcgtcaccgccaactacgcggtaaaagttccggacggcctcgactccgccgccgccagcagcatcacctgcgcgggcgtcaccacctacaaagcggtcaaggtctcccacatcaaaccgggccagtggatcgccatctacggcctcggcgggctgggtaacctcgcgctgcagtatgcgaaaaatgtctttaacgccaaagtgatcgctatcgacgtcaacgacggacagctggagctggcggcctcgatgggcgccgacctgaccatcaactcccgcaatgaagatgcggcgaaagtgattcaggaaaaaaccggcggcgcccacgctgcggtagtaaccgcggtggctaaagcggcctttaactcggcggtggatgccgttcgcgccggtggccgcgtggttgcggtgggcctgccgccggaggcgatgagcctcgatattccgcgtctggtactggacggcatcgaggtggtcggttcgctggtcggcacccgtcaggatctggtggaagccttccagtttgccgccgaaggcaaagtggtgccgaaagtcaccctgcgtccgctggaagatatcaacgctatcttcaaagagatggagcaaggtcagatccgcggccgtatggttatcgatctgcgtagctaatcacccgcgcctctcccgtccgggagaggcgatccccctggcacgtcctctcgcttcccaacccgggaagtaaatgcaatttccgcaaatgcttagcgcaattccttggttcctttgtttttagccgcgcccgatgatggcaacacaatagataacaaaggaattcaccatgcatcgtcattttcgcctgcccgcgctggccgcgctgtttctcaccggcgccttttccgtctgggccgccgacacgccggttaaaggcggcaccttaatttatctggagcagcaaccgcacaccaatctctatccgcccgccggcggcttttacccgaatggcgggattctcaatcagataaccgacaagctcacctggcagaatccaaaaacgctggagattgagccgtggatcgccgagagctggaccagcaatgccgataaaaccgagtacaccttccacctgcgcaaaggggtcactttctcagatggcacaccgctggacgccgccgccgtcgccaaaaacttcgatacctatggtctgggagataaagcccatcgcctgcccgtctcagaggtcatcaataactaccagcgcagcgaagtgatcgacccgctgacggtaaaattctacttcaacaagccgtcgccgggcttcctgcagggaaccgccaccatcggctccggtctggtatctctcagcaccctgcagcgtaattttgaagagctgggcgatgcccgacatattatcggctccggccccttcgtcgtgcaggatgaaaaaccaggccgcgagctgacgctggtggcgcgcaaggattaccagtgggggccgaaaaacattgcccagcaggggcccgctaacctcgacggcatcacctatattgtgacgccggaagacagcgtgcgtatcggcgcgctgctggcaggtcaggcgggctttattcgccaggtgcaggcctacgatgaaaagcaggctaccgatcagggatttaagatctacgctgcccctacccgcggggtcaacgacagcctgagcttccgcccggataacccactggtcgccgacctgcgggtgcgtcaggccctgctccatgctaccaacgccaggcaggtggtggagacgctgttctccgctaactacccgcaagccacctccgtgctggccagctctgccgccggctatgtcaatctcagcgataaactcaccttcgaccaggccaaagcccggcagttgctggatgacgccggctggaagcccgccgccgacggtattcgcagcaaagacggtcagcggctggcgctgaccgtctatgagtcgctgccgcagccgcaaaataaggaagtgctgcagctgatcgcccagcagtggcgccaggtgggtgtggcgttgacggtcaaagccggggatgccggtagccgtacgctggataacctcgacccgcagaaaaccccgctcaccgtctcagaagtgggccgcgccgacccggatgtggtgaaaagtatgttcttccccaacaaccgcgatgcgctgctgcagaaaggcggctccagcgataaagtgcagcgcttccgcgatgataagctcaatgacctgctgaccggcatctccgcggcggtagagccgcagcagcgcttgcagttaaccggtgacgcccagcgctatctgatcgataacgcctatgtgatccctattttcgaagagccgcaggtgttcgccggcgcgccgtgggtcaaaggcgtcagcttcgaggccgtcggtcgtccgtcgttctacggcgcgtggctggacaagcactaagaggccggttatgagcgcttatcttctgcgacgattcggccaggggctgctggtcctgtgggcggcctttaccctcacctttttcctgctgcaggtcctgccgggggatgcggtgctgatcaagtttcagaacccggacctcggcctgagcccggcgcaaattgcggagatgcggctggcctacggcgccgatagcccgctgtggcgccagtacctgcacacgctgctggcgatgctgcacggcgacttcggctattccctgcaggcgggtctggcggtcagcagtctgattgccagcaacctgccggataccttaagcctcgcgctgccggccttcctgctggcggtggcgctggcgttcgccctcgctttcgcctcgcggctgccggggctgcgctggctgagcaattttctgcagtcgctaccggtgctgtttatctctctacctaccttttggttgggtatcgccctgatccagctcttctcgtttcagttgcgctggatcccggtaatcaaccccggcccactggaaggactgattttaccggttatcgccgtcgcgctgcccatctccgccccgctggcgcagatcctgatgcgcagcatggatcaggtggcggttcagcccttcgtcgcggtcgcccgcgccaagggcatgagcgaaacgggcgtcctctggcgccatgtgatggggaatgccctgctgccggcgctgaatattgccgggctgctgctcggcgaactgattgccggggcgctgatcaccgagaccgtcttcggccgcagcggcctcggccagctgacccagcaggcggtcaataaccaggatatcgccgtactacaggcggtggtgatgatctccgccctcggtttcgtcctgatcaacctgctggtcgacctggtcatgccgcgactggatccccgactccatttacagaccggaggtgcgaaatgagcctggtcgactataccatcgcggttcgccgccgcccggagtggcgtagagtgcgcctgcagcctggcctgtggctggcgtgggcggtgatgatcgccgccctgttaatggccattgccccacagtggtttacctccgctaacccgctggaggggatccccggcgctcagcgcctggcgccgcaggcgcactactggctgggtaccgaccagctggggcgcgacctgtggacgcgggtggtttacggcgcggtgcattccctgtcggcggcgctgatcgccgtcgccatcggcctggtggtgggtaccgcccttggcaccctcgccggggcgctggccggacgcgtggaatccaccatcatgcgcctggtcgatgtcctgctggccatcccctccctgctgctgcagctcacggtgattattctgctgggtttcggcacggtaaatgcggcggtggcggttggcatcgcggctatcgccagcttcgcgcgcctggcgcgagcagaagtggtacgcgtgcgccacagcgattacgtcgaggcggcccggggcagcggcggcacttttttcgccgtcttctggcgccatattctgcccaactcgctcactgcggtgcttgctttcgcgacgctgcagttcggtcaggcgatgttggccctggccaccctcagcttcctcggctacggcactccgccgccggtcccggagtggggactactgatcgccgaaggtcgcaattacctgtcaaccgcctggtggctgaccaccttccccggcctcgccgtggtcgccgtggtccttgccgccaatcgtcttagccgccagtggagtggagcacgcccatgaccgttctgtccgttgaagatctacgcatcagctaccgctcgcggggcgaatggcgcgaggtggtgcacaacatcagcttttccatccagcgcggcgaaatgctggccttcgtcggagaatccggctcggggaaaaccaccaccgcgcaggccattatcggcctgctggcggataatgcccgccgggatgccgggcggattgtcctcaatggcgaagtgattagcgactggtcggataaacgcctgaaccgcctgcgcggagtgagcatcagcctggtcccgcaggatcccggtaattcgctcaacccggtaaaaaccattggtcagcaggtggaagagatcctgcggctgcatcagtccctctccgccgctgagcgccgacagcaggttcttaacctgctcgctaaagtcggtctcagccacctggaacagcgttttgaccagtatccgcatcagctgtctggcgggatgaaacagcgggtgctgatagccatcgccattgccctgcaaccggatctgattattgccgacgagcccaccagcgccctcgacgtcacggtgcagaagcgcattctcgacctgctcgatatcctgcgtcgcgagtcgggtaccgccgtgctgtttgtcacccacgatctggcgctggccgccgaacgcgccgaccggatcatggtgtttcgccagggagagattcaggaacaaggcgccaccgagacgattgtccagcgtccgcagcatccttacacccgccagctgctccacgacctgcaggatgcgccgttgaggctaacggcggcgcgtcaccggccgctggccacgccggccattcgcgtggaggggatcagcaaacgcttctcgctgggcaaacaggcgctgcaggcgctcgacagcgtcagctttgaggtcagacgcggcagcacccatgcgctggtgggcgaatccggctccgggaaaaccaccctggcgcggatcctgctgggctttgagcgcgccgacgccggacaggtcatcatcgacggtatcgacgccgggcatctcagccgcgaggcacagcgtcagctgcggcgcaagatccagtttgtctaccagaaccccttcgcttcgctcgacccgcgccagacgctgtttgcgattatcgaagagccgttaaaaaactttgagcgcctcagcgcggcgacgcgtcgccagcgtgtggagagcgttgccgcccgggtggccctggcccccgagctgctgtcgcgtacgccgcgggagctttccggcggccagcgccagcgggtggcgattgcccgggcgctgatcctcgagccggcgatactggtccttgacgaagcgacttcggcgctcgacgtcaccgttcaggcgcagatcctcgccctgctgcagcagctacagcagcagctgggtctgagctacctgttcattacccacgatctggcgacggtcaggcggatcgccgacagcgtcacggttctgcgcgccggccaggtggtggagcatggcgacgtaaactgcctgttcgccgccccgcagcaggcctacacccgcgaactgatcgccgccattccccaggtttccccccgcttagcacaggcccacacggagaacgcataatgcctaaacgcctcggtttttttacccgtctgctcgatcagggctccgcgcaaacgcgctaccggctggcggccgaacagatccgccacgcggagcgtttgggcttcgacagcgcatggattgcccagcaccattttcatgaacaggaaggcggcctgccttcgccgctggtgtttctcgcccacgtcgcggcgcagaccgaccggatccgcctcggtacggcgattatcaccttgccgatggaaaatccgctgcgcgtcgccgaagacgcggcggtactggatttactcaccgacggacgtctggaggtgggttttggctccggcggcacgccaacctcgtttctgcccttcggcctgaccagcgagcagcgcggggcggcgtttgccgaccatctgcacctgatccatagcgcctggcgcggcgacacgctgagccacccggacaaccgtctctatccgccggcgccgcagttggcggagcgtatctggatcgccaccttctctgcggagggcgccatccgcgccggtcaggcgggacacgggctgatgctgtcccgcacccagccacggccacccggcgagccacgtctgccgctggacgccattcagaacccgatcattgacgcctacctggcggcgctgccggacggcgttgcgccgcggatcctcgcctcgcgcaccgccttcgtcgccgacagtcacgcccacgccctgcaggtcgccgagcccggtctgcgcaagcaggcaactcagcaccgggcggcgggtcatacgatagaaggtgacagtgtcaccgactatctgcaacagctggatgcccacgttggcgatcctgagcatgttattgcctccctggcgcaggacagcgtgctggcccgcgccaccgatatttcgtttcaggtgcactcggtcgagccttcgcaccgggatacgctgcgttccattgagctgatcgctcagcatattgccccccacatcagataaggagtccccatgacgctgagtcaggatattctggccgaactggcggagatcgcccccggttccccgctcgatcaggcgcgcgccgtccgcgatgccgccacccgtcacgcccagggaagttatgaagtgctgttccgccagcaggacgctgactttcctcttgatgaacgcttcgcggtggccgcgaaggtggcaaaactgcaccaggcggacgcgcttgcggcgcactatgccggtttcggcctcgccgatccgaccaccgatcgtctggtcccggcgctggcctttgcccgcctgctcaccttcacccccgttgaagccactcccggcgcgctgcacaccttaaccggcgcgggctggagcctgcggggcatcgtcaccctggcgcagctggtagcctttgtcagcttccagagccgactgctgctgggcctgcgggcgctcaaccataagcccatcgtcagcgcagatacgccgctggtcgccggatactggcataccaccccgtacgcgcagagcggcaaagcggccccggttcgcttcacccgcgacgagctgcactgggaaccctggctggccgataaaccgctggaggaattcaacgctgaagaacaggcgattctggccaaatatggccatagcgactccccctactttcgcctgctggcgcgcaaccagccggtgctggagcagcggaccctgaccgataggggcattttctataccgcgggaggattgccgcgcgccgaacgcgagctggccgccacggtcgccagtaaaatcaacggctgtatctactgcgcctcggtgcatgcccgcaaagcggcgcagctggcgaaggacgagaccgccgtcgacacgctgctggcggtgacgccgggagaggatctacgcgatgggcaatcgccgcgctggcaggcggaaatcgacgccgccgccgcgctatcggtgacgccacccgcgttaaacgccgatcatctggcggcgcttgatgagcagggcttagatactctggcccagctggatctgctgcagtccgcggcctttttcgcctgggccaaccgcctgatgcttaccctgggcgaaccctggcgtgagtaggcgtcgttagtaagcttgtcgccgctgatggcagccatagatgagcaaggcgctcatcgccagaaacgacagcgcggcggcggggagcgccacgctgttccagccaaagccctgggcgatcatcattccgccgcagaaggcgccgatggcgctgccgaggttaaaggcgatctgtcccccggccgcccccagcatctcgccgcctttggcgttctgcagcagcaggatctgcagcggcgctgacagggcgaatagtcccgcgcagcagagaaatgccagcgccagcgaagcgactttgtgttcaccgaaggcaaagatcagcagcagcgtcacggctatgaccccgtcggtcatggccgcaatgcgcagcgggctgtagcgcccggaaattttgccgctgaacagattgccgaccaccattcccagccccgccagcatcataatcagcatcatcttgctttcagcaaagccggatacattgagcataaagggcttgatatagctgaaccaggcaaacacgccggcgttaccgaacatggtggcggcgaaaatcagccacggcgccggggaggcaagaaaacggaactgctcgcgcagccgcgtgctggcccggtcataaagcgtgggcacccagcagaagatcgccagaaataccgccacgttaaataccgcgataagcgcaaaggtatagcgccagctgaagtgatgcccaagccaggtgccgcccgggacgcccaccaggttagcgatcgtcatgccgccaatcatccccgccaccgcggcggtcaccttccccggcggcgcgattttcgacaggataatcgcgccgacgccaaagaacgccccgtggggaaacccggaaaccagccggccaagcgccagcatggcgtagctactggagaaggtaaacagggtattgccgagaatacacaggccagccaggaacagcatcaccgatttcagggaaaaccggctggagagcagcgccatgatcggcgcgccgatcaccacgccgaaggcataccaggcaatcatattgccggcggcgggaatggatattccgacatcgtgcgccatatccggcagcacgcccataatgccaaactccgccatgccaagtccaaaggtgcccagcgccagtgaaaaaatcgtttttttcatacatcttataggggtattgagagccggccggcattatttactatcccgccccgacacaccagctaaaaacgcccgacggcagtttcctccatacaacagcctgattcgttcatgttccccagccgcgtggcataccggcggcgtggtttcgcagtaacaatcccctatcaaaatcagtgggctcaaagagataaacacctcattgatctcaagttaacttgaggttgtaaagtcaaaacatcgttcaccttgggagaattatccatgcaaagtgttgatgtcggttttactcatgtcgcctttaccgtccgctgtctggccagcagcatcgatttttatacccgctataccgcgatgaccgtcattcaccagcgcgagcccgccctcccctcggcgcggaaagtggcatggctcagcgaccgcacccggcctttcgccctggtgctggtgcaaagtgacgatccggccgatacgccgctgggaccgttcggccatctcggcgtcgcctgcgccacccaggccgagatcgatgagaaagtggccctcgcacggcgggaaggtgttttacgccgggagccggagcagctgggcgatccggtgggctatttcgctttctttgccgacccggacggtaacaccctggagctgtcgtgggggcagcgggtgggactggaagtcatcctggcgggaaaacccggcgaataattttccaccgcctcgccgggggaggattacacttcaaagggatacctcggcaacacggagcatggcgatgggcaacaagaaaagcggtaatccggtcgacacggcggcaaaaatcgcgccgctcgacaacaaagcgtacgagaaagcgctgcgcaaactccacgttgagctggtgaaactgcagcgctgggtagtgcacaaaggactgaaagtgtgcattgtctttgaaggccgggacggcgccgggaaaggcggcaccattaaggccatcaccgagcgcgtcagcccgcgtatctttcgggtcgtcgccttaccctcgcccaccgagcgcgaaaaaagccagctctactttcagcgctatatcaagcatctcccggcggccggcgaaatcgtgattttcgatcgcagctggtataaccgcgccggcgtcgaacgggtgatgggcttttgtacgccggaggaggtgcagaagttcctcgacggcgcgccgatggtggagcgcggcatggtcgaatcgggcattattctgctcaagtactggctggaggtctctccgcaggagcaggagcgccgtctgcgggatcgcatcgacgacgggcgtaaaatctggaagctctcgccgatggacattaagtctttcaaccgctgggatgaatatactgctgcccgcgacgccatgttcgccgccaccgataccgcctgggcgccgtggttcgtcgcccgctcggaggataaaaagcgcgtgcgtctaaatatcatcacccatctgctgtcgcagatcccctatgaagctttaccggtggagcctgtgacgctgccgaagcgcaaaattggcaaaatgaaacagactaattttcctttccgcttcattccagagaagttttgattatttctcgtcgcgctggttaatgccagcgccaggtttattactataaccatgaatatttcaggctgttacttccctctggaagctgtctcgcaaaataaatattaaacttactgctggtatttattttttagtgggtaaagtaaataatcacagaaccaaccgcaaggagcctatgatgaaaagtaatacgctacgtaaaagacccactgacgtacccgtccagaaggcgtcagaacagccaggtaaggatttacgagaagcagataaacagcgacaacacaaggaattcattgccgcaatgaatgaatttattgcaaaaggaggcactcttactgatgatgaatttttcagggtgctatgatgcttgaataattcaatgtttatcgaaattgttctgctcagacaaataaaaccctgccatattatatgatcgtgcagaatgattattatgcagacctggccacgagagtcattattcctttaatgcgaccacaacagttaccacgctggcatcagcatgccgtaccaaggataaatatagaatttgacagctttttactttgtacgccaatgagcagtaacttaaataataaacggatcccgccacaggatttcgtctgcaatctgagtcatgcgcgccagggcgttatcgattcaatcgatacacttatcacgaactgctgactgccgggaacccgctccgacatctccggagcgggtttcgcgccgtgaaggcttacttcatcccttcacgactctctttcatcgcttccaggcgttcgacatcgcgataccagcgcgggtggtgtttcttcgcccagcggcggctcaccttgccttcaatcattcccttaatcgaccccttcacccagaacgccatatacatatggataaggatggcgtggatcagaatgatggccgatgttgcgtgaatcagcaggctatagcgaatcacctgcatcgggaaatattccgcaaaatatgggcgccagataatcaccccggtcaccagcagcacaaatatcatgctcatgatggtccagaacatcatcttctgcccggcgttatacttaccgacgcgcgccaccttatgctcgttgcctttcagcacctcgacgatgcctttcagccacggaatatcctgtttatcagggatgttatggtggacaaagcgcacgaacataaacatcagcgcgacaaaaatcagcaccccaaagaacgggtgcagaatacgccccatctgcggcgtgccgaaggtttccgttagccactgtagcgtcggaaagaagaacgatattcccgacagcgccaccaggaagaaacagataaccaccgtccagtgacaggcgcgatcgataaacgtcgtgcgcacaatcatcttcgatttactcatcatgcttctcctcgtcgtcgtcaacttccttgttcggcccgataccgatgtagtggtaaatcagcccggcgaaggtggcgataaagcccgctgccgccagcggtttcagcgcccccttccacagactgatactggtatcgatctgcggttccttcggcagcttgtgatacagctccggctggtcggcatgatgcaggacgtacatcacgtgggtgccgccgacgcccggcgggttgtaaatcccggcgttggcataaccgcgttttttaagcttagccacccgctcctcggccacctccagcatctctttcttcgtaccgaagtggatcgcgccggtaggacaggttttcacgcaggccggctcctggccgacgctgacccgatccacgcacagggtgcatttatagacccggttatcctctttattgaggcgcgggacgttaaacggacaccccgcaatgcagtagccgcagccgatgcagttttcctgctggaaatcgacgatgccgttggcgtactgaataatcgccccagcggacgggcaggccttcaggcagcccggctctgcgcagtgcatacagccatccttgcggataagccactccagtttgccgttctgttcggtctcgctaaaacgcattaccgtccaggatttggcgctgagatccgccgggttgtcgtacaccccgacgcagtgccccacgtcatcgcggatgtcattccactcggaacaggcaacctggcaggctttacagcccacgcaggaggagacatcgataagcttggcgacttccgctttatagtcccgcgcgcgcggcgcgggggtgatcgggttggtcgcggagcgtttaataatgtcttgggtttccatcgccattgaatcgctccttacgctttctcgatgttgaccaggaacgccttgtattccggcgtttgcgagttggaatcgccaacgttaggcgtcagggtgttggcgatgtagcctttgcgggccacgccttcaaaaccccagtgcagcgggatcccgacggtctccacctgctggccgttgacgttcagcgtgcgcagtcggcgagtcaccacggcaaccgcgcgaatgaagccgcgcttgctgctgactttcacccaatcgccgttagcgatacctttgcttttcgccagcccttcgctgatttcgacaaactgttccggctgcgcgatggaattgagcaacgcatgcttggtccaggtgtggaaatgctcggtcagacgataggtggtcccgacatacgggaatttatccttcttacctaagcgaatggcgtcctcttcatacaaccgcaccaccgggctggagaccaccttcgggtgcagcgggttagtgccaagcggggtttccatcggctcgtagtgctccgggaacggcccttccgccagtttatcgagcgcaaacaggcgacccagcccctcctgctgcatgataaacggcccggttttgctccctggcggcgcggtattgaagtccggaatatcattcccgacccacttgctgccgttccactggatcagcatccgcttcgcatcccagggcttgccgttgatatcggccgaagcgcggttgtacagcacccgacgattgagcggccacgcccaggcccatcccagcgtattgcccaggcccgaaggatcggcgttatcacgattcgccatctggttaccctgctcggtccagctgccggtatagatccagcaagacgacgcggtgctgccgtcatcgcgcagcagcgcgaagctattgagcagttggccttttttcgccagcaaagtgccattttgatcgtagagatccgccagcgcgtagccgttgttctcttttgccacctcttccgattccggatggtccggctgcttgtagcgccagctcatcttcagcaggggttccgcgcccttcccgccttcggtgcggtacagttcgcgcaggcgatggtaaatcccggcaaggatttcgccatcattgcgcgcttcacctggggcatcctgacctttccagtgccactgcagccagcggccggagttggcgatcgaaccgtcctcttcggcaaagcaggtcgacggcagacggaagacttcggtctgaatcgccgacgggtcgacatcattagactcgccgtggttctgccagaaggtcgaggtttcggtcaccagcgggtcgataaccaccatatatttcagcttgctgaggctgcgaaccactttgtttttgtccgggaaggaggcaaccgggttaaagccctggcagatatagccggtgacgttgccgttatccatcatgttgaagtatttgataacgtcgtaagcctggtcccacttcggtaaccattcaaagccccagtcgttctctttttgcgccgcctcgccgtagaaggatttcatcaggctaacgaagaatttcgggtagttgctccagtagttcacctgctcgggcaaggtcgccttcggcgtgttggcgctgaggtagctatgcagatcggtctgtttgtccgatggcagcgtcaaatagcccggcagactggtcgacagcaggcccaaatcggtcagcccctgaatattagagtggccgcgcagggcgttgacgccgccgccggccatccccatattgccgagcagcagctggatcatcgccatggtacggatgttctgcgcgccgacggtgtgctgcgtccagcccagggcatacaggaaggtggtggtgcggtccgcggcgctggttgaggccagcacgtcgcacactttaaggaagtccgctttcggcgtaccgcagatgttttcgaccacctcgggcgtgtaacgcgaaacgtgctgcttcagcagattccacacgcagcgcgggtggctgagcgtttcatcgcgtttggcgtagccgttttcatcgaactggtagttccaggacgatttatcgtactggcgtttttccgcatcgtagccgctgaacagcccctcttcgaaggcaaaatcatcccgcaccagcaggctggcattggtgtaatgcttaacgtactcggcattgatcttattgttttcgatcaggtacagcagcacgcccgacaggaaggtaatgtcagtaccggaacgaatcggagcatagatatcggccaccgacgcggtgcgcgtaaagcgcgggtcgacgacgatcagcgtggcgtcgttattgtttttcgcctccatcgcccagcggaaacccaccggatgggcttcggcggcgttaccgcccatcaccaccacgacgttggcgtttttgatatccacccagtggttggtcatcgcaccgcgaccaaatgttggagcaagacttgctaccgttggtccgtgtcagacgcgcgcctggttgtctaccgccagcatacccagcgatcgcacaaatttttgcgttagcatgccggtctcattgcttgccgccgaggcgcacagcatgccggtggaaagccagcggttaaccgtcacgccctgttcgttcttttcaataaagttggcgtcgcggtcggctttcatcagtcgggcgatgcggttaaaggcttcatcccaggagatgcgctgccatttatccgagcccggggcgcggtattgcggataacgcagacggttttcgctgtggacatagtccagcaggcctgcccctttcgggcacagcgcgccgcggctcaccggatggtccgggtccccttcgatatggtagatcgcttctttggcgtttttcgcaccgtcgccgaggctatacattaatagcccgcagcccacggagcagtaagtgcaggtgttgcggatctctttcgcacgcagcaatttgaaattgcgtgcctgagccagcgccattttaggggcaaagcccagggcggcggcggtagttccggccataccgcctgcgcagatcttaaagaactttctgcggctgacgtccattgcattcctccatgcaggatgttgattcatcgcgcggaggaaactaacagcaaaatcccgggaaaatttgcgtcaaatcaaggaggaaaaccttcgcccccttaatcgccagccctggccattttcgctaatccctaagggttagcaacggcggaaaatttcgcccctcaccgataaaaagatgatatatatgccggctgcatttgcgtaaccatcaggaaaagcatggagaaaaagagagccacgacgatcggcttcgccgccattatcttatggagcacgatggtcggattgattcgcggcgtcagcgaaggactgggagcggtcggcggggcggcgatgatttacagccttagcggcctgctgctgatctttaccgtcggctttcccaacctgcgccagatcccgcgtcgctatctgctggccggcagcgtgctgtttgtcagctatgaaatctgcctcgcgctgtcgctgggctatgccgccagccgccagcaggccattgaggtggggatggtcaattacctgtggcccagcctgacgattttattcgccattctctttaacggccagaaaagcagctggctggtgatccccggcctgattttcgccctgctgggcgttggttgggtgttgggcggtgagcatgggctacagcccgatgagattatcagtaacgtcatttccagcccgcttagctatctgctggcctttgtcggggcgtttatctgggccgcctactgcacggtgacggccaaatatgcccgcggtaaaaacgccattacgctgttcgtcctgttaaccgccctgacgctatggctgaaatttctcgccagcgaccagccgccgatgctgtttagctggccggtggtcattaagctgatgacggtctccgtggcgctggggctggcctacgcggcgtggaacgttggcatcctgcacggcaacgtcagcctgctggcggcggcctcctacttcacgccggtgctctcctctgcgctggcggcgatcctgctgagtgcgaccctgtcgtggtccttctggcagggggccgggatggtatgtctcggctccctgctctgctggtacgccacccgccgttagccgagatcgcctccggctaccggcagcgtcacgccggtgatatagctggcctcatcgctggcgagaaacaggatcgcattcgcctgttccgccagcgtgccgtaccggtgcagcagactgctcgccaccgtctgatcgacgacctgctgataccacgccttttcctgctcgctcggctgctcttcgttacgcggcgtcaggcgcggcggcgcctcggtcccgcccggggccacggcgttaatccgaataccgctgccgctgtactccatggcaatcgagcgggtcagcgcgttaacgccgcctttcgccgccgagtacggcacccgattcactcccgccgtcgccaccgacgaaatgttgacgatgctgcctttgccctgcttcagcatccatggcagcgccgcgcggcagccccacagcgtggggaacagcgagcggcggatctctttctcaatctgctccggctgatattcggcaaaggggcgcgcccagatggtgcccccaacgttgttgatcagcacgtcgatacggccaaaatgagcgaccccggcggcaaacgcctgctcggtactttcccacgcttccagatccgcctccagcgccagcaccagacagccggattgcgccagcgtcgccgccagctcatggacgtatgacgagcgatcgatgagcagcagagccgcgccttctgcagccgcctgctccgccgtctggcggccaatgccctgcgccgcgccggtgatgacgacgactttatcggtaaaacgcattttgtctccttatgccgccgcgctctggctggcgataaatttctcataccagaaccccgccggggtgatcccgcggtcgcgcaacgccgtggcaaccgcgttaaccatcggcggcgggccgcagagatagatgtccacgtcgccgttgttcagcatcgcgtcgtcgagatggtgggtgacaaagccgcgctgcgggcaagtgctgttttcatcggccaccaccggtagccaacgataccccgtcagctgttgaataaaggtatccagcgcgtcggttttcaccagatcgcagtcacgagtaacaccgtacagcagcatcaccggacgctggctgccctgtgtctgcagggtatggagcatggagagcagcggcgccaggccggtaccgcccgccagcatcagcagcggacgttcgccgtggcgcagatagaagctgcccatcgggccgctgagggtaagacgatcgccgggccgcgcccgctgggttaaccactggctcatcatgccgccaggcacgttacgaataaggaaacgcccttcgagggaacccggttgcgagctaaatgagtaggcgcggacatgaagcgtgcccggcacctgaatgttgacgtactgccccggcaggaaggccagcggctcatcgagggcgaccaccagttcgatggcggtatcggacagtaaattcacctgccgcacctgcgccccgagcgtcgccagggccgttttgcactgcgcggcggccaccggcacatcgatcacgcagtcgctggtcgggaccatctgacaggtcagcacctggcgggcctgcgcttcgtcgtcgcttaacgcctcgtcgagataatcttcacccaggtcgtactcaccgctggcgcagtggcatttgcaggtaccgcaaacgccgtccgagcaatccatcggcagattcaccttctggcgataggcggcatccagcaccttctctccggcatggcattgaataaagcgggttacgccgtcctcaaaattaagagcaatattgaaggtcataagcgcctcttaaatgtggtaaacgtcaatcacctgacggatataatcgttattcaggcgcacggttttgcggacgatctgcggtctgccgtcctgttcgattagcgtgcagcaggtagagccaaaataggcatccgtgtgctgatagcgatggctccaggtgacccagctgtaacgcacctccagaccctcgtcgctttcgcccatcagctcaacgttgctgatgatatgggtggtccgcggctctggcgtgctggccccggagcgctcggttttaatgcggtagacgcgatcctccagcccttcgcggttggggtagtagataagcgaaatctctttttgcgggtcgcgggtcagctggtcatcgtcgccccacgccggcatccagtagaccacctgcgggctgtagcagctgagccattcgtcccactgacgatcgtccagcagacgggcttcgtagtagagaaactggcgaacctgttcgaggttaagcatcaggccacctccacgcgctgggtaatggactggtcgtaacgctgttgttcctgttcaatggccgccagcatcagcgtctgccagtggtggtgatgggcgatgtacagcgcttcgtcctccgatttcaccccgcttaaccgcggcgaaaagccggcatgttgcgcatgctcatccgcgccatcgacccagcgcagcgcgccgcggctgaggtcgctccatggcagattttcgccgagaaagccgcgctggcaggcgctgaactcttcgaggtcgtccggcgtccccattccactgacgttaaagaaatcctcgtactggcggatacgcagcgctctggcctggtcggattcccctttcggcgcaaagcaccagatggtgacttcggttttatccaccgcaatggggcggatcacgcggatttgcgtcgagaactgatccatcaggtagacattggggtacaggcacaggttgcgggtttcgttgaccatctggtcggcacggcgttcgccaaattccgcctgcagccgttcgcggtgggcatagaccgggcgcacttccgggttcagcgcccgggtccacaacagcatatggccgttatcaaatccatagccgccgccgaggctttttgaccaaccgttggcatccaccgcgtgcgtcccttccgcttcatagttgcggcgtgacatggttgaggcgtagttccagtggaccacgctgacgtgatagccatcggcgccgttttccgcgcccagtttccagttgccctcatatacatagctcgacgaacccttaagtacctcgagcccctccggcgcctggtcgacgatcaggtcaataatcttgcaggtttccccgagataggcctccagcggctgcacgtcggccttgaggctaccgaataagaaaccgcgataggactgaaaacgcggcaatttttgcaggtcgtgggagccgtcttgtttaaagctcggcggatagccgccagtgctctcatctttggcctttaataatttgccattattgctgaaggtccagccgtggaacggacaggtaaacgaatttttattcccggttttgcgtcgacataacatggcaccgcggtgagcgcagctgttaattagcgcgtgcagctcattctttttatcacgggtaataatgacaggctggcggcccagcgtcagggtataataatcacccggctggggaatttgactttcatgagcgagaaatacccagttaccttcgaaaatatgcttcatttcaaattcaaacagctgcgggtcggtaaatatagagcgatggcagcggtaaatatgattttcacggtcgacaactaaggcattattgattttgtctttgagcgtcgagagcgttttttgcatgagtcggtccctcctgcaggattcaggatgaaagaaacagggtgaattcttcgttttcgagtgcaatatctggcccgggcagtagcgtgcccggggccgataatgccgcttactctttggcgcgcaggcggatcccgcgctgctcttcgtcggcgctcagcgctttacacagggtgaaatcaaaacaaacctcggtgtgctctccctcaagattgcgctgcgcgatgatctcgcggtcggtcacttttaccggatcggcaatcaggccgtcgcgggtggcaaaggcaaaatcgtcccacaggtatttatcgccattgaggttaatctggctggtcagatgtttatgacccggcgcggagacgaaaaagtgaatgtgcgccggacggttgccgtggcgacccagtctgtccagcagtttctgggttgggccatccggcgggcagccgtagccggagggcatgatgctgcgcacgctgtagcggccatcggcgccggtgcggatccgccggcgcaggttgtactcactctggcctgggtcgaagaaggaataatttccgagggtgttggcgtgccagatatcaacaatagcgttggccactggccgaccttcggtgtctttgacttcaccgtgcagccacatcacttctccggcgtcggcgccgtcatccatgcgggcgtgaccctcggccagcggcgcattagccacgtacagcggcccttcgatggtgcgcgggtgccggtttcccgatgcgctgccgcgtcgatggcgtcctggcgcagatcgaggaaatgctccagtcccagtcccgccgccagcagcgccgcctcctgacgcccgcccagctcgtgcaaatagtttaccgcgtgccagaactcttcttccgtaacgttatagtcgtcgatgagcgtgcagatattttccagcagacgatgaataatcgccttaaaacgttcatcgccgccggcaacatctaatccggcactgtcgcgtaataatttctgaatagctggttgttgtacgaatacattactcatactggttctctcttatattttgcagggtatacgccggtaataccggcgtgaggtcagatattattattagcgatcgtcatcgcgaattgatgacggatgacgacagagggcttccacttttatcgccataaagggatatagcggcaatcccattaatatttgatgcaattcttcggcatcttgaacatcgaaaatactgacgttggcataaaggccggcaacgcgccagatatgccgccatttgccttcccgctgtaattgttgcgaataggctttttcgcgttgttttatttcctccgcctcgttggcgggaaagccaggcggaatattgacggtcatctccactttaaataacatttttttctcctgttccccgctacggctggcgggtataaaaatgcagtttgtcttcatccagctcgacgccaaggcccggcgtttgcggcagcgccacctgaccgtcggcaaaggtgagcggcacgctgacaatatcgtctttcagcaacagcgggccgaacatctcggtaccccactgcagcggcagcgtcgaccaggcgtgcagagaagccacggtccctacggtgccttccagcatggtgccgccgtacaggccaatccctgccgcctgcgcgacgcgggccagcgccagcacgctgttcggccccccggctttggcgattttcagcgcgtaagcgccggtaaagccctgctgcgccagctgataaccatcgtaagcggtcgcgaccgcttcatccgcgaggatcgcggtttcaatttgctggcttagccgcaccagggcggcattatcgtgggcgctgaccggctgttcgataagatcgacgcccatcgccgccagttcgcggcagcctttcgcgccggtggcagcgtcccaggcctggttgacgtcgacacggatgctggcgcggtcgcctaacgcttcaacgatggcgcgggtatgacgcaggtcggtggcgagttcacgcgcgccgatcttcagtttgaacgcccggtggcggccttcggccaacagtttttctccttcagcgatatctttcgcggtatcgccgctggctaaggtccacagcaccggcaacgccgtttgcagcgcgccgccgagcagggctgataccggcagacctaaggctttgccccgggcgtcgagcagcgcagtttcgatggcggacttcgcaaaggtgttgcctttaatggcgccgttcatacgggcggtcagcgcattcaggttatcggccgactgccctttcaacagcggcgtcagataatgggtgatcgccgacgagatggcctcggggctctcaacgccatagctcaagccgccgatggtggtggcttcgccgatgccgcagatgccgtcggaacgggtaaggcgcacaatcaccagcgactggcagcccatggtggtcatcgacaatttatgcggccggatggtcgggacatccacaatccagctctcgatttgctctacggtggcagtcattttctgttcctgatgagatatataactttttgtacccacatccataacgggggtctgtgccattgacaatagggttcagcctggcggatggtcaacggcgataatcgaaatgttgtgcgattatcgacgcgtttgttaaaagacggttattaatgtgatcatggtggtaaaaccggcacaattcagcgcgccccattttgcgcaaggtatagtgatctgccgtgagctttacgctgcaacggagaaggatgcgatgagcgacaatatccccaatacgctgagcgccaggcaggccgagcacgaccctaactttatgctatctctggcccgcgggctggaggtccttaacgccttcaccccccagcgccagcggctgaccatttcccagctcagccagaaaacgcaaatctcgcgcgcggcggtacgccgctgtttgtataccctcgccgcgctgggcatggtgcacagtccggatggccgtagctatgaactgctcccccgggtgctggccgtcggccacgcctatctggcaggcacgccgctggccaaggtggcgcagacggcgctggataatcttggcaaagcgctcggcgaatcctgttcggcggccacgctcgacggggataacgtgctttatattgcccgcgcggcggtcaataatttactgagcatcgatctggggcgcggcagccgcctgccggcgtgggccacgtcgatggggcgggtgttgctgagcgcgctgccggaggaacagctggaagtgacgttgtcacgggctacgcttattcgctacactccgcataccctgtgcgatttgtccggtttacgtgcagagatcgcccgggtgcgcatgcagggctatgccctcgccgaccggcagatcgaggtagggttgtgctcgctggcggtacccgtgctgtcgcgtcacggtcaggtggtggccgccctgaatgtcggggtacctgccgcgacggtcagcgccgcggcgttaaaagagaaggctctcgccccgctacggcgcgcggcgatggatctgtcgctgcagctatagcgccgactgcggtttcgccacggtggcgaggctgcgccagatcccggcggccagcagcagaagcaatacacccgccgtcgccagcaccaggctatgagcctgaataaaagccgtcttcgccgccgccatcagcgcctgcgccaccccggcgggcagcgcctgggacagactcaccgcctcgccaatcgatgacgccgcctgctgcgccatggcgccactcaggccagacggcagcgcaatagaggcgctgtagctgcgggtcaggatcaggccgaacagcgctatgccgagaccggcgcccagctcataggccatggtttcaatcgcccccgcggccgccgctttctccttcggcgctgccgccataatcgcggaactggaggccagcagcgcgctggccacgctaaagcccagcagcgtcatcagcccccaggccagccactgctgggtactgaaatcggtcaacgccaggccgagaaagctgaaggcgctgagcagcatcccgccggtcgccacctcgcgcagcccaagccgcgataccagcaggccggcaatcgggccgctgaagccgctggccaccattaccggcagcataaatatccccgcctcgaacggcgttttctggtgcacaaactgcagctcctgggccatcagtagctcaaaaccgaccagggtaatcagggccgtcatcgccatcatcaccccgcttaagattatgcgatgggtgaacaggcgcatatccaccatcgggcgggccgccgacagctgcttgcggataaaccaggttaacatcgccgccccgccgagcgccaccagcgcggtgagccacagcgccagctggcccttcagcgccgatttcgcgctaaacaccagcatcaggatcgcggcaatcaaaacgagcgcctgcagtagattgagcggctgttcgcggcgcgcgggctggcgcggcaccactttcgcattaatcgcgataaccaccagcacgatcggcacattgatcaggaacaccgacccccagtagaaatgctccagcaggataccgcccaccagcgggccgaaggccgcgccgccggagccgaccgctgcccacagccccagcgccatattgcgctggctggcctcggcaaaggtgctgcggatcccggccagcgtcgccgggacgatcatcgccgcccccaccgccagcaaagcgcgtgaggcaatcagcgtcatggccgtcggcgacagcgcggcgcacagcgaggcgatgccaaaaatggcgctgccgagcagcagcaggcgcttaaagccgatcttatcgccaagggcgcccatcggcagcaccatcccggccatcactaatgagtagatatcaatgatccacaacagctcattgccgctgctacccagcgccacgctgagggtcggcgcggccacatgcaacaccgtagcgtcaatcgccaccggaatataaaccagcaaaatcgccatcagcgtcatccattgccgtgacatagcttgtacctcaatcaatattgaatattggacacacgtccaggatggcgatcctgccggattgttgaacacatgtccaactttttgttacactcggccaaagccagatgacagcggggttctatgcactatttacaacgtgatgcgcgacgggaagggattatgcaggccgccatgcgcctggcgctgcgcggcggctttgccgccatgaccgtgcggcagatcgcccgcgaagcccaggtggccgccgggcagctgcaccaccacttcacctccatcggcgagctgaaagcgcaggttttcatccgcctgatccgcgagatgctcgacatgccgctggtggctgaggacgccagctggcgcgagcgcttgttctcgatgatcggcagcgaggatggccgactggaaccctatatccgcctgtggcgcgaaggccaggtgctggccgacagcgatccggacatcaaagcggcctacctgctgaccatgaatatgtggcatgccgagaccgtcgccatcatcgagcagggcctcgccagcggcgaatttcggtcggctgagcctgcggcggatatcgcctggcgctttatcgccctggtgtgcggcctcgacgggatttatgcgctggacgcgcaggccctggatgaggcggcgtttagccgctatgtaaataagatgattacgctggagttgttttaggcatatttacatttagtaacaattaattccgctacgcttaccacgtgctctctgtcagcacgttttttttatctacgcttcatagataacgcaaattaagcgttattcactatccccttgtattcagctgttgaccttatttatttactcctttccgggcaagtagagggcaatatgtcggtgcagaatgataaagataatcattaccttttgaacaactggcggcctgaaaacaaggcgttctgggaaaataaaggccaagccattgcgcgaagaaatctatggatatcagtggcctgcctgctgcttgctttctgcgtatggatgttattcagcgccgtagcggtgaatctcaataaggtcggttttcatttcaccaccgaccagctttttttattaaccgccctgccttcactttccggcgcgatattacgggtcccctactcctttatggtacccctttttggcgggcgctactggaccgtattaagtaccgttatcctgatcgtgccttgtatttggttaggggtggcaatccagaatattactactccgttctgggtatttattattattgcgctgctgtgcggttttgccggagcgaattttgcttccagcatgggaaatatcagtttctttttccccaaagcgaaacagggcagcgcgctgggagtcaacggcggccttggcaatctgggcgtaagcgtgatgcagatggtcgccccggcggtcatcttcctgccgctcttcacctttctcggcgtccatggcgtcacccagcccgatggttcgacaatcaccctgagtaatgcggcgctcgtctgggtaccgctgctgctgctcgccaccgtcgcggcatggttcggcatgaacgatatcgccggttcaaaggcctcgattcgcgatcagcttcccgtgctcaagcgaccgcatatgtggctgttaagcctgctctatctggcgacgtttggctcgttcatcggcttttccgccggctttgccatgctggcgaaaacccagtttcccgcggtcgatatcctcaagctcggcttctttggaccgttcatcggcgcgctggcgcgctcgttcggcgggatcatctccgaccgtctcggcggcgtgcgggtgacgctggttaacttcgtcctgatggcgctgtttaccggcctgctgtttctgaccctgccaggcagcggctccggcagctttctcgctttctacgtggtgtttatggggctctttttaaccgccggtctgggaagcggctccaccttccagatgatcgccgtcatcttccgccagctcaccatcgacagcgtaaaacagcgcggcggcagcgatgaagaagcgcagcacgaggcggtcaccgataccgctgccgcgctgggctttatctcggcgatcggcgccatcggcggcttctttattccgaaagccttcggcacctcgctggcgatgaccggctcaccggttggcgcgatgaaagtcttttttgtcttctatgtggtttgcgtgctggtgacctggctggtctacggccgccgtaaacccgcttaaccataacgatttatctgccggatagcggcttacgccttatccggccttacgagttcgttcgctcatccggccgggtggcacgatgccggacatcatcggagcaggagaaatgtcatgagtaaacttctggatcgctttcgctactttaagcagaagggcgagacctttgccaacggccacggccaggtctacaacaacaaccgtgactgggaagatagctaccgtcaacgctggcagttcgacaaaattgtccgctccacgcacggtgtgaactgcaccggctcctgcagctggaaaatttacgtcaaaaacggtctcgttacctgggaaacccagcagaccgattatccgcgcacccggccggatctgccaaatcacgaaccgcgcggctgcccgcgcggcgccagctactcctggtatctctacagcgccaaccgcctgaagtacccgctggcgcgtaaacgactgattgagctgtggcgcgaagccctggcgaagcatcccgacccggtgctggcatgggatagcatcatgcaggatccggcaaaaacccgcagctataaagcggcgcgcggcaaaggcggttttgtccgctccagctggaaagagctgaaccagctcatcgccgccgccaacgtctggaccatcaaacactatggcccggaccgcgtcgccggcttctcgccgatcccggcgatgtcgatggtctcctacgccgcgggcactcgctatttatcgttgattggcggcacctgcctgagcttttatgactggtactgcgatctgccccccgcctcgccgatgacctggggcgaacagaccgacgtgccggaatccgccgactggtacaactccagctacattattgcctggggctccaacgtgccgcagacccgaaccccggacgcccacttctttaccgaagtgcgctacaagggcaccaaaactatcgccatcacgccggactattcggaagtcgctaagctctgcgaccagtggctggcgccgaagcaaggcaccgacagcgcgctggcgatggccatgggccatgtgatcctcaaagccttccacctcgataacccgagcgattactttctcaactactgccggacctacaccgacatgccgatgctggtgatactcgagccgcgcgacgacggcagctatacgccgggccgtatgctgcgtgcttccgacctgcttgacggtctcggggaaagtaataacccggaatggaaaaccgtggcctataacagcgacggcgaactggtggcgccgaacggctccatcggctttcgctggggcgaaaaaggcaaatggaatctcgaacaacgggcagacggcaaagatgtcgagcttaagctgtcgctgctggatattcgcgacagcgtggtgtcggtgggcttcccctactttggcggcaacgaaaacccgcattttcgcagcgtagcgcagtcaccggtgacccttcacccgctaccggctaaacagctgacgctggccagtggcgaaagcggcctggtggtcagcgtctatgacctgattctggccaactacggtctggatcgcgggcttgacgatgtcaatgcggcgaaggatttcgccgaggtcaaagcctataccccggcatgggcggagcagatcaccggcgtaccgcgtcaacatatcgaacaaatcgcccgcgagtttgccgatacggcgcataagacccacggccgctcaatgattatcctcggcgccggggtgaaccactggtaccacatggatatgaactaccgcgggatgattaatctgctggtattctgcggctgcgtcggccagagcggcggcggctggtcgcactatgtcggtcaggagaaactgcgcccgcagaccggctggctgccgctggcgttcgccctggactggagtcgtccgccgcggcagatgaacagtacctcttatttctacaaccacgccagccagtggcgctacgaaaaactgaccgcgcaggagctgctgtcgccgctggccgacgccagcaaatttagcggcagccttatcgacttcaacgtccgtgcggaacggatgggctggttaccttctgcgccccagctcaacgtcaacccgctgaccattaagcagcaggccgaggccgccgggctctcccccgcggagttcaccgtccagtcgttaaaatcaggcgatattcgctttgccgccgagcagccggatagcggcaaaaaccatccgcgcaacctgtttatctggcgctcaaacctgctgggatcgtccggtaaggggcatgagtacatgttgaaatacctgctcgggaccgacagcggtattcagggtgatgaactgggcgccagcgatgaggtaaaacctgaggaagtcgagtggcagaccgcggcgattgagggcaaactcgacctgctggtgacgctggatttccgcatgtccagtacctgtctcttctccgatattgtcctgccgaccgccacctggtatgaaaaagacgatatgaacacctcggacatgcacccgtttatccacccgctctccgccgccgtcgacccggcctgggaggcgaaaagcgactgggagatctacaaggatatcgctaaatccttctcgcaggtctgcgtcggccatcttggcaaagagaccgatgtggtgctggtcccgctgcagcatgattcccccggcgaactgtcgcagccgttcgaggtgcttgactggcgcaagggcgaatgcgatctgatccccgggaaaaccgcaccgtcgattgccctggtggaacgcgactatcctgccacctgggaacgcttcacctctctcggcccgctgctcgataagcttggcaacggcggaaaaggcatttcgtggaatacgcaaagcgaagtcgatttcctcggcaagcttaactacgtcaagcccgatggtccggccaaaggccggccgcggatcgacagcgccattgacgcctccgaagttattcttagcctcgccccggaaaccaacggccaggtggcggtgaaagcctggcaggcgctgggagagtttaccggccgcgatcatacccatctggcgctcaataaagaggatgagaagatccgctttcgcgatattcaggcgcagccgcgcaaaattatctccagcccgacgtggtccggactggaaagcgagcacgtctcctacaatgccggttataccaacgtacatgagctgatcccatggcgcactctctccggccgccagcagttgtatcaggaccatccgtggatgcgcgccttcggcgaaagcctggtagcctatcgcccgtccattgatacccgcagcgtcagccagatgaaggccgtgccgccaaacggctttccggaaaaagcgctgaatttcctgacgccgcaccagaagtgggggatccactccacctatagcgaaaacctgctgatgctgacgctgtcgcgcggcgggccgatcgtctggcttagcgaaaccgacgcgaaagagctgggcattgaagataacgactggattgaagcgttcaacgccaacggggctctcaccgcgcgggcggtggtgagccagcgggtgccgccggggatgaccatgatgtaccacgctcaggaacggattatgaatatcccgggttcggaagtgaccggtcgtcgcggcggcattcataactcggtaacccgcgtctgtccgaagccaacgcacatgattggcggctacgcccagctggcctatggctttaactattacggcaccgtcggatcgaaccgcgacgagttcatcatgatccgcaaaatgaagaatattgcctggctggatgacgaaggtcgcgatcaggtacaggaggcgaaaaaatgaaaatccgttctcaggttggaatggtgctgaatctggacaaatgcatcggctgtcacacctgctcggtcacctgtaaaaacgtctggagcagccgcgaaggcatggagtacgcgtggttcaataacgtggagaccaaaccgggcattggctaccccaaaaactgggaggaccaggatcagtggcaaggcggctggatccgcggcattagcggtaagctgacgccccgcctcggcaatcgggtcagcgtattatcgaagattttcgccaacccggtgctgccggcgatcgacgattactacgaaccctttacctatgactaccagcacctgcacaacgcgccggagggcaaatatctgccgaccgcccgcccgcgctcgctgatcagcggcgagcgtatggataagattaactggggcccgaactgggaggagctgctcggcggcgaattcgagaaacgcgcccgcgaccgtaacttcgaagccatgcaaaaagagatgtacggccagttcgaaaataccttcatgatgtatctcccgcgcctgtgcgagcactgcctcaacccgagctgcgtggccacctgcccgagcggcgccatctacaagcgtgaggaagatggcatcgtactgatcgatcaggataaatgccgcggctggcggatgtgcatcagcggctgcccgtacaaaaaaatctactttaactggaagagcggtaagtcggaaaaatgtatcttctgctatccgcgcattgagtccgggcagccaacggtctgctcagaaacctgcgtcgggcgcatccgctatcttggcgtactgctgtatgacgccaaccgtattgaagaggcggccagtaccgaacatgaaaccgacctctatgagcgccagtgcgaggtgttccttaatccaaacgatccggcggtcatcgaggaagcgctaaagcaagggatcccgcacaacgtcattgaggcggcgcagaagtcgccggtctataagctggcgatggactggaagctggccctgccgctgcatccggagtatcgcaccctgccgatggtctggtacgtgccgcccctgtcgccgatccagtcggttgccgacgccggcggcttaccgagcaacggcaacatcctgccggcggttgagagtctgcgcatcccggtgcaatacctggcaaatctgctgagcgccggcgataccggaccggtcttgcgcgcgctgaaacggatgatggcgatgcgccactacaagcgctcgcaaaccgtcgagggcgtcaccgatacccgcgccattgaagaggtgggcctcagcgttgagcaggtcgaagagatgtatcgctatctggcgatcgccaactacgaagaccgcttcgtgatccccaccagccatcgcgaactggcggaggatgcctttccggaacgtaacggctgcggctttaccttcggcgatggctgccacgggtcagatacgaaattcaacctgtttaacagccggcggatcgacgccatcgacgtcagcggcgtgcgtaagcatggggagggcgagtgatgcggatcctgaaagtgatcggtctgctgctggagtaccccgacgagttactgtgggagaaccgcgacgacgccctggcgctgatcagggccgatgtcccttccctgacgccgtttgtcggtgagctgttgacggctccgctgttggatcgccaggccgaatggtgcgaggtgttcgagcgcgggcgcgccacctcgctgctgctgtttgaacatgtgcatgccgaatcccgcgaccgcggccaggcgatggtcgacctgatgaatcagtatcagcaggcgggtctgcagatcgattgtcgcgagctgcccgaccatctgccgctgtacctggagtatctcagtattctacctcccgcggaggctcgggaggggctgcagaatatcgcgccgattctggcgctgatcggcggccgtcttaagcagcgagcctgcccgtactaccagctgtttgacgccctgctggcgctggctaaaagcccgctcaccagtgacagtgtcacaaaacaggtggcgggagaaaagcgcgacgatacccgtcaggcgctggacgccgtgtgggaagaagagcaggtgaagtttatcgaagataatgcgaccgcttgcgatagctcgtcgatgcaagcttatcaacgacgctttagtcaggatgtggcgccgcagtacgttgacatccgcgccggaggcccgaaatgatccagtatctgaacgtcttcttttacgatatctacccttacctgtgcggcaccgtctttctggtgggcagctggctgcgctacgattacgggcagtatacctggcgcgcctcatccagccagatgctggataagcgcgggatggtgctatggtcgaacttatttcatatcggcattctcggcatcttctttggccatctctttggcatgctgaccccacactgggtctactcgtggttcctgccgatgtcccagaagcagctgatggccatgatccttggcggcatctgcggcgtgctgaccctggtaggcggtatcggcctgctgatgcgccgcctgaccaacccgcgaattcgcgccacctccacgaccgcggatattttgatcctgtgcattctgctgattcagtgcgcgctggggctgacaaccatccccttctccgcccagcatccggacggcagcgaaatgctcaagctggtggactgggcgcaggcggtggtcaccttccacggcggcgcctcggcgcatctggacggtgtcgcatggatttaccgcgtccacctggtgctcggaatgaccatctttctgatcttccccttcacccgcctggttcacgtctggagcgcgccggtggagtatttcacccggcgttaccaggtggtacgctcccggcgctgagcgctggcggtgtttaccattcatccttaccggtagcccggacgaggccttcgcgccaagtccgggtatttatcgtacctggctccaggctttatgccggatggcggctgtcgccttacccggcctacagggtcctctcacaggctcataccccgtaggcccgcgcaagcgcaacgccgccgggcaagatatcaggcacggtacctgtaatttcgccgggtggcggctacgccttgcccagcctacagggacctctcacaggctcatacctcgcaggcccgcgcaagcgcagcgccgccgggcataaggagatttacttcccggcttccggatgggtatcgaacgccgccatcaccgccgccagcgccgcttcgctgaagccatgtttaggatcgtccacccccaggccgaagcgggtctgcagcccttcatacagcgcggagacatcggcaaaatcgatcttctccaccacatggttattctcccagtgggtaaagtggaagttggtgagggtcattttgccgccgtccggcagatgacgacacatcagcagatggtgacggaagtgggactgcggccagtgcgccgaccagaagttgcccatcacataatcagatgcatactggcggcctaaatcgaaatggtacatcgactgccagtgttcgtgatggttgaactgcagcgtccactcatccccttcatgcaccagacgatagctgccgtgcggcgtttgctgtaggatatcggccagcagtttgatcggcgcggtcagcgtctggccgccgaagccgacgtcggcgatccagcgctcccccgccacctccaccagcaacagacggtgagtacgcggcggcatctgcggcgggttggccagcaccacgcggcccagcaggctgcggacgttaaagcctatctcgcgcagcgcgcgctccagcaggccattctgttcaaaacaataccccccgcggcgggcggcgatcagcttctcttccagcgccccatcgtcaaggtggatttcacgcggcagcaggacgtcgaggttttcaaaggggatggcgctgttatgctgcagatgcagttcccgcagggtatcaatggaaacatcaggctcacccgtccagctcagacgggaaaaataggcgcgtaaaaagggactcatcagggcctccagctgtaggtgtccgacatttatagcctatttttccgcgccgaccgtcttttttgtgcgcttagcgttaaccgcacgtgcggcgctgcatcagcgccagcgacgtcagcatcaggaccagaccggtcaacaacgtcaggctggccatcgccatgccctgaccgacggaaccctgttcgaactggcgccagataaacaccgccacggtttgcgtaccggccggagagagcagcagcgaggtcaccagctcccgggaggccaccgcgaacaccatcagcatcgccgccagcagcgccggaaagaccagcggcaggacaatcaaccgcagcgcctgcagtggcgacgccccgtgcaccctggcggcgggctcaaggttcgggcccagctggcgcagcgcgctgccgacatagcgcaccggccagggcaacagcaggcagcaataggagagcagcagcatccacagcgtgttatagggcgagcgcggccagaagggctgattccacagcaggatcaaaccgacccccaccaccacgcccggcagcgccgccggcatcagcgacagcgcatccaccatcccgcgccctttaatcttctgcaccatcaccagccaggcggccagcaggcccagcgcgccgacgattagcgccgaacccagggccagcgacaggctggtgccgagggccgacagggcatctccctgctggtcaaacagcgccgcgaaatgacgcagcgtgacattctcaacactcacgccaccggagagcgtgcccatcacgctggtgagcatcatcgagacggcggggacgccgaccgccaggccgccgacggccgccatcgccagcacggcgggcagcatcatccagcccagcgatgccccgtggttctcccccggcttaccggtgacgctggtgacctctttctcccccaccagccgcctttgcagccaccaggcgaataacgccaccgccatcagcagcagcgacaatagcgcggcgccagggagatccaccggccagtcggccagctttttctcaataccgaccgtcagcatcaccactcccgcccggctgcccagcgccgccggtacgccaaactcctcgatagcgagggtaaacgccagcagcgtgcccgccgccagcgccggggagagcatcggtagcgtcacgtgccagaaggcgcgccaggcgctggcgccatggacgcgggcgaccaccgccagccgggtcccgctcgccagcaggctgcgggagacggcaaagtagaccaccggaaatatgttaaaggtcatcaccagcacgatcccgctgcggctgaacagcagatcgttcagctgccagccggtcagctgctgcagatagccctggctttgcagggccagcatccaggagagcgccgagatatagggcggcgtaagaaaggggatcaaaaacaggagatcccacagccggggcagcggcagcgaaaacataccgcgcaggatgccgagcggcaggccaatcattacgctgaccagcgccacgccggcggcgatccatagcgtaccgccgagcatcgccggcagctgaggatcggccagcagcgccgggatgccgccaaaggcgtccccgagcgaaccggcgctaaaatggggaaaaatcgcctgcagcacaataaacactaacggtaacgcgaccagcatcaccagggcggcaagggtcgcgccggaaaggaatgtttgtttcacaaccggttcctgaagctgagggtcctccggcggccagcgccggagaaacgggatcaattactgcgcgtacagctgactgaagcgggcgagcacggcgccccgctcgctgctgccctcgctggtggtgggcagcaccttcagcgcgtccagtaacggacgtttagccgccacgtcgcggcgggcgggcatcagccaggcgtcggcgaccttcgcctgaccttccggcgacagcacgtaatcgataaaggctttggcctcgccgggatgctggctggttttgaggatcatcatcgggcgcggggcaatcaccgttccgctggccgggaagatcaccttcagcgactcgccctgctgaatgttgccgtaggagacataatccaccgcgccaaacaccgccgctttcgctccctgcatcaccggcgtcaccgcctgggcgttgggtccgctgactaccatgccgttctttttcagatcgtcaaacagttgccaggcctggtcgcccatgctgttttgcagcccgatcagcaaatccagcgacgcgccggagagcgccgggtcgggggttgtcaccttgtctttaaacgccggctgggtgagatcccgccactctttcggttccggggtgccgcttttactgttccagacaatacccagggcggagacgccctgggcgatatagtccgccgatttcaggttcgccggtacctggtcggcgttggcgctcgcaaaaggcagcaaccagccccgctggtgcagatcttcggcggtatcccacgaggcggagatcagcacatccgcctgcgggttggcctgctcggcctccagtcgggccatcactttgccggtggtggcctgaaaaacggtcaccttcaccccggtctgttgttcaaaaccgctggccaggcttttcgccagcgagccgggtccggcggtgtaaacggtcagcgcatgggcgctggagagcatcatggcggaaagagccatcgcgagtaccactcctttcttaacggtcataacggtgttcatgcaacttcccctgaggttggcgtaacggcgcggacagcggccacgcggcccgcggataaatagacaatctggtcggctaacagctcggcttcacgtcggtcatgggtgacatacagggcggtgatgccgagctgtcgcagcaggcggctcatttcgccacacagcgattcgcgtagttcgctgtccaggttggagagcggttcatcaaacagcagcacccgcggcgcggcgacgatcgcccgcgccagcgccacccgctgctgctgaccgccggagaggcctgaaggcttacgttcggcaaagccgttgaggcctacccgcgccagcgcctcgctgacccggcgctcgcgttcgctgcgggagacgccgcgcatgcgcagcggaaaggcgacgttctgcgccacgctcatatgcggccagagggcgtaatcctgaaaaaccatgccgatatcgcgctgctccgggggcaatccccatcctgcgcgggcgaccagcctgtcgccaaagcggatttcgccgctggccggcacgctcagcccggccagcagacgcagcagtgtgcttttgccgcagccggaagggcccagtagcgccacgatgcggccgggttcgatatgcaacgtgaagcggtcaagaataggggtctctgcgaaggcgaaagagacctcctgcagggtgataggggtcagcgtgcgcatcatcgccctccctttcgggacagcgagaccagcccggcggtcgacatccgacggggcacgctcacctgggatagcatcaggggagccaacatattgtgatcctctttgggacttagtgctggcgactatagtcagacgagatgacgtattgattacattttcattgcggcttaacgtgttacctgccaaccgacccattattcaaggaacgcctatgagccgctttcgccacgttgaactgcagtacgccagccgcctgctcaaccacggcccaaccattttgatcaccagctacgatgccccgtccgaccggcgcaacgttatggccgccgcctggtcaatgccggtggaattcgccccgccgcgggtggctatcgtggtggataaaagcacctggacgcgggagatcatcgagcgcaatggcaccttcggcattgtggttcccggcgtcgcagccgccagctggacctacgccgtcggcagcgtcagcggccgcgatgaggacaaattcaatgcctgggggatcccggtagtgaccggcccggagctggggctgccgctgatcgaggagaaatgtctggcatggatggagtgccggttgctgccggcgacggcggcccagacccagtacgataccctgttcggggaggtggtctctgccgccgccgatgagcgcgcgttcgtcaccggacgctggcaattcgacgacgataagcttaataccctgcatcatcttggcaccggcaattttgtcgccagcggccgtcatgtgcgggcaaactccctcgacgaataagcgtgacttgccgcgggcggccggtttttcccctgcccggcctgcggcccccttttaacccggtgggcggcggcgatcggcgctgggggtcaggccaaacacttttttatacagggtggtaaagtggttgctgttggcgaagccgcacagataagccacttcggtaatggtcatctccgtttcgcgtaatttgacccgcgcggagaccagccgcagacgtttcagataattatccggggttaatccggtggcctctttaatatggcgaaacgcggtgcgggtggtgagatgaaattgctccgccagctgctgccagttatgttcttcgaaacagtgctcctgaagccaggtgagtaatttatgcagtttatagcgagtgctgctatattcggcttccgactcggctgtgagaatggtggtcaccagctggaaaaagagagactcccgtagcggggtattatccgccgccctcagcgccggggaaaatatcttttccactagttcccggcaatagctgcgagtctccggcgccagccagccatagcaggcggcgcgctgcgcggataattgctgcagcaatccctccatctgctgtaaatagccaaaggccaccgccggattaattaagacattaatcagcttcagcgtccccagctcatcataataatgcacatcgccaggctggacgtaaaatacgtctccctgttggatatacagcgggcgaccattaataacgtgtaacccatgcccctcctcgacgatcaccagttcggcaaattcatggccatgctcctggctattatcctccgggtcactggcgtatatgccgagcttatcctggggatgggtgaaataatactcaacggtcagtgtcatcattacagcaaatcctgaacaacctatggcgcaggggcacgataatctattccagccctcggcacgcgcccgatgtgcggatttgtgatcgccagcgcccccacctcattattcctgccattttcactgacggtttggcattgccagagtggtagccgcgccggacgacggcctatgctgcgcctaacctaacggagaggacgcagtatgtcacaagcaattcaatacaattccagcgtggcgatgatccgtcacccgcgctttttacagcgtgcggccgacctgacgcccgcgctgcaacgcctgcgccagacgccgcaggccatcgtcgaggccgtcgctgaaccaggagcgctgaacggctggcgggggaataccgtctgcacgccggagcagttttatcagcaaccgctcaacgtcggcgacagcatcattattgattttggcagccattttgttggctacctgcagttcagctgccgcagcgtcggcagcccgcccgatgccccggcccatctgcacttcaccttcggcgagacgctgagcgaagtctgtgagccgttcagcgaataccagggatggctgagcagcagctggttgcagcagcaggatctgtggcttgacgtcctgcccgcccgggtcgctctgccacgtcgctattgcctgcgctacctgaaggtggaggtcaaagcgctgtcgcgcaagtttcgtctgcagttcgatgagatcgctctggaaaccgtcacctctgccggcagcccgcacccggcggtcatcgccgatccgcagttgaaagccattgatgacgttgccgttcgtaccctgaaaaactgcatgcaggaggtgtttgaagatgggccgaaacgcgaccgtcggctgtggctgggcgacctgcgcctgcaggcgcaggtgaatgacgtgaccttcggccaccacgatctggtccgccgctgcctgtatctctttgccgcccatacccgggaagatggcatggtttccgccaatgtctttgttcagccagaggtacgcgccgatgacacctttctgtttgattactcattgttttttgtcgacgtgctttataactacctgcaaagcaccggcgacacggaaaccgtcggtgagctgtggcccacggcgcggcggcaaatcgagctggcgctgacccgctgcgattcgcaggggctggtgcgcgacagcgatgactggtgggtatttatcgactggcaggcggagctgaataaacaggcctcggcgcagggggtgctcatctactgtctgcagcgcgccctctggctggcgcagcgttttgaaccgcagcgggtacccgactacactgccacgctctggcagctgaaggaggccgccctccaccatctgtgggacaacgagcggcaggtgtttatcagcggcgccgtgcgtcaggtctcatgggcgtcgcagatctggctggtgctggcggaagttggcaccgccgggcagcgtcaggcgctgatgcgccgcctgcagcagcagccgcccgccattgccatgaacaccccgtacctgcgtcatcatcacattgttgccctgctacagtccggcctgcgcgaggaggcggtggcggagatcaaagcctactggggggcgatggtcacctacggcgccgacaccttctgggaaattttcgacccccaacatcctgacttttccccgtatggcagtaagcttatcaacagttactgccatgcgtggagctgtaccccggcctggtttattcgccagtacggactttaacaacaacgataagcgagtgatttatggcagaaacaacgtttaccctgtggcggcagcgccttggctatggcattgccgatctctcctgcaaccttgtgtggcagatgatctctctgtatctgatgttcttttacaccgacgtcatgggtctcccggcctattatgtcggcctgatgttcctggtcacccggctggtagacggcgtggccgacgtgctgatggggctggtgatcgacaataccaccacccgctgggggcgctgccgcccctggctgctgatcggcgccctgccttttggcctgctgtgtattctggccttttatgtgccggatttcggcaccaccggcaaactgctgtacgcctttgtcacctatctgtgtctgtcgttcctctacaccctggtgaatattccgttctgcgccatgctgccgtttttaaccagtgattccgcagaacgcaccacgctgtcggcggtgcgcattttgctgggctcccttggcgccaccatcgtcgccgtggctacgctgccgctggtcggcatgctaggcaaaggcaaccagcagcagggattcctctataccgcggtgatttttggcgtactggcggcctttttcctgctggtgagctttcgcaacgtcgaagaaaagatcacccttaccggggagcgcatgaccctgaaacgcgcctggattagtctgcgcgccaatcgtccgtggtgggtcttcgccagcaatatctttctgatgtggggtgcctttttctttcagaccggggccctggtgtacttcttccattattacgtcgggaataccgagctgacggcggttatcgccgggatctccaccttcgttcccctgctcggcaccctcaccgtcccgctgctggcccgacgcatgaaaaaacgtcatgtctatctggtggccagcgcggtcaatctgctcgggatggggattatgatggtgtctggcgcccacgttctgggactgatcgtcggggccgtgatcctctccctcggcgccggccaacgcacggctatctatttctcgatgcaggccgacccggtggattacggcgtgtggaaaaccgggattaataccgcagggatcctgacctcgataaacggttttctcggcaaggtggcgatggctggtgccggggctatcaccggcgtgctgctctcctccagcggctatatcgccaaccacacgcagagcgacagcgccctgttggccatcaaggcctgctatctatacattccggcgctattgatcctcgcctcgatgctgtggatgggccgcttctaccgcctcgacgatcagtatgagcagattnnnnnnnnnnnnnnnnnnnnnnnnnnnnnnnnnnnnnnnnnnnnnnnnnccgccggagaatcccccgccatgtaaggcgcccccgctgatttaacctctggataaattaaggatttttatgcgtatctctgtgattagcgcagcggtttgctgcgccctttttccgctcatcagcgtcagcgccgccggcttgagcgtggagcaacggctggcgcagctggaagcgcgcctcaatctcgctgaacagcaggccagcgaggccagccgccgcgcgcagcgggcagaacagcaaactgccgccgccgagcagcgcgccgcggcggcggagcagcaggtgcaggcgctcagccagcagaccacggctcgcgaacaaaaacagcaggccactaatcagcaactgagcgagcagctggcgaagcgcgccccggacgatgggtttacctttaacgcctacgcccgttccgggatgttagtcaacagccatggtaaaggcgcccgcggcgggccgggcgtctccccggccagttcgctcaacggcgatgcccatgtcggtcgtctcggtaacgaaaaagataattacgctgagctgagctttggcaaaaagctcaccttcaacgatggttcatgggcgcgctttaagaccatgctcgccgacggggccaccaacccggatccgtgggttcaggataacgacagccaccatctgaacattcgtcagctgtacgtcgagatgggtaactttgccgaattcaccggtccgttaaaacgcgcctcaatttgggccggcaagcgctttgatcgggataacttcgatatccactttaccgatagcgacatcatgttcctcggcggtaccggcggcgggatcaatgatgtcgactggggaagcggcctgcgcggcgactattcggtgtatgcacgtaacttcggcgaccttggcagcgataattacgcggataatgacatccagaatctgctgttcaccgccaaccatttttacggcaactggcaactgatgaccacggtgatgaccgcccagggcaacgatgatctgaaagataatacctcgaccaccgggagctatgccctgcgcagcgataacaccgccataaacggctactacgcgatgctggccctgcacgacaaacagcagttctacggcctggcgccgggggtgtctgaaagcgccctgcaatacggcgtcgggctgggcgccgaagcgcgtcagccggggagcgatggcgatctgaccgagaacgcggcctccctgcgctttgcgtcgtatggcatcctgccgttggggaaaaactggcagctggcgccgtcggtgatagcccagcatagcgaagaccgctatcgcgacggcgaccgctacgactgggcgacgtttaacctgcgggtatcacaggggatctccgctcacttcgccctgctgtatgaggcctcgtggcagtatatggatctcaatccgaacgggcgcagctatcgctataatgacaacgtttatcagtatcaggcggtgcgcggtgatttctacaagctgaccttcgcccccacctttaaagtgggtgatgtgctggatatcaaggcgcggccggaaatccgcttctttgccacctggatgaactgggataaagcgctggatcgctacgcgataaatgacgatttcggcagcaaaggctttaccgccggtgggacatggaacttcggcgtgcagacggagatttggttttaatcaaacggcccgtccggctcaaatgccaggacgggttgatttaaatacacgctgttactttgtcactatgccagtgctgtatgaagtaatataaactcataaaataaaaaccataacaggctaaaaagataaaggttgtttttataattccaacaagtgactttcgttttttctcaacgatgagaagatcatggaacctttcttgctgttgttctggtgttaaattatcaactattttattttttatatcatcgtgaatctttttaaacgttcgcttttcacctggaaagctaccgtgtagaagaaacaaaaaaataaagaaaagcataacgaatgctaatatccgaatactgggctcagttaccccccagcatccaagggtagcaataaacaaccagataccatgagtgtttgctcgcgctctaaacctatcaatatgagcgctgtatttcttgatttctttcaaaatagaatcgttggtttccatacgtaatgcactcctttttaaagaccccggttacgaaagggggcaaactctgccattttccttgcgaagaataacctttcaaacaaccttcaacaagttgataatcaatggattaccctgaagcaataaaagcagttttctggctgcaccggttggctgacgtcgtttcgtttcccagcttttaaccaactcgtagctaacgccaacggccgctgcaaagtcctgctgttttaaacctgtggcttcacgtatcgctttcacgtcaatttcgctgaaggtatgaacgtgctgctccatcggcatttgttcacctttctcgatcctgaccatttcttctgcactcgccagcagatcggcaaacaattcgtctttcatatacacctcagttggctctctggcgctatcgacttttccatcattaatagctcagccttactttatgtttatatgctagtttattaaatcagccacttgtctcaacatctttttttgctcctgatttaactcatcctgttcatttttaggatagatgagcgccaggtaaattcttccctttttcgttacattatagtaaatcactcgtacaccgccgcgcttccccatcccgggacgactccagcgaattttacgaaaaccaccggttcccgaaattgtgtccccagcctcgggatcgtttataaggatttcctgaaaggcccgaaattcatcatcctgcaacagcacctggcgtcgcttactgaaaccttgtagttcaataaaagtcaacatctcattccctgatgtcctgacgacttaccaaataacatacatgtacagggtacactaatcaaggagtttatgtacccggtacattttaaaaaattcacccatgacaaaattcatcaatcagcacttcgccagagaaacacctgccggaggcggcgcaaagccgcttgccgttggacaaatgcgcagcatcgcctccgggtgtcgggttacatgctataacccggcttcttaatcaactgcgccatctgcggggcgatctcactgtcccacaccgcctgccacgcgtccggctcaacctgagtgagtgcgacgctgacggcgctctctttgctgttcagatggcggatcagcacctcagtgatgtcggcggccagcgcggttttttgttcatcagtcagttcacggggaaaacatttaatatcaacatgcggcatagcaaagactccttgtgatcagagccataacgctaccacagaatggccgttctggttggcatcgcgtgcgttaaatcagcttgttacggcgtagcgccgcggccagctccggtcgctgacagaccgcccgggcgatggcggcgaattttggcgcgtggtcgtcaaaccacgcctggcggggtccccagctgtacatcgccgcgatatagcaatccagcaacgttatcgacgcgcccagcgcccacggcccggcggccagctgctgttcgaaccagagatagagatttttccggtactggcgacaattctccaccagctgctccgcggcggcgggcgcccagcgttccgggtaatcggcataggtaaaggtaggatagacattggccaccagccagaccagcaggcgctgaaactgcggacgctgtggcgtccccggcgcgggggccagatcgggacgctggtcgaggatcatcagcgcgatggcggcggtttcggtcatgatgctcccgtcggccagcctcagggtgggcacctggcacagcggattaatctgccgcagacgctcgcgcgccggaccgggctgatcaaagccctccacgtcaaccacctcgtagggaatatcggccagggagagcatcagctcgctaatcgtcgagccccatcccggcacgccataaacggttatcatggtcggcctccagggtaaagcctaagtgtaggcagaaaaacgccgctcacctacccggcacaccatgccactgggggttagtaggttatccccggcgggttgaccaccgactgcgccaccgcttcgccctgctccccccaacgcgccagcacctgctgatattcaccgcgggcaatcgccccgtcgagagccgcctgcagggcatagaccagaccgttgccttttttggtggttgtcgccacccacgcttttttcggccccaggcccaccacccgggtctggccgttaagcgccgctttataggctgccaccgactgcgggccgaaaaagatatccgcccgcccggactggatatagagattgccggaggcatcatcggtcaggtagaccggctgggcctgcggccgtccggcggcgcggttgtcctcgttccagcccagcaggatccgctcctgattggtgccggacccgacgatcactttgcgccccgcgagatcggcgggtccgtttaccgcggcgatgtcgctggtggatttcaccgagaaggccagggagtccacccggtaagtcgcaaaatcgaacttctctttgcgcttctcggttaccgcgatattgatcagcgccacatcgtagcggccggaggcgatgcccagcggccagtcctcccacgcggtgggcaccagcctgagcttcaggccaaggcttccggccagcaggcgggctatatccgggtcgctaccgatccgcgtgcggttgtcgctggccagcagggccagcggcggcgaattgagcgccgagatcgccaccgttagcgtccccggctcgacgaagcgatagcccggcggaattttcgctatcgcctgcgggtcgcgggtgaccggcaatggctgctcattggcgcgcagatccagcgccgcgtaagcgctcatggcaaaagcgctgagaacaagggtcattagcgctctgttcatgacggcagcaccctggataaaaactgccgggtacgcggatgctgcggatggttgagcacctcgtcgctgctgccctgctcgacgatcctgccgtcgaccataaacaccacctggtcggccacctcgcgggcaaagccaatctcatgggtgaccaccaccagggtggtgcccgatcgcgccagcttcttgatgacatccagcacctcgcccaccagctcgggatccagcgccgaggtgggttcatcaaacaggatcacccgcgggttcagcgccagcgcccgggcaatggcgatacgctgctgctggccgccggagagatgccgcgaccaggcgtcggctttattgcgcagtccgacgacgtccagtagctcataggcgcgggcaatggcctctttgcgcgtgacctgctggtgggcgatcggcgcctcaatcaggttctccagcaccgtcaggtgcggaaacaggttaaagttctggaacacgtagccgacgttgatccgctggcgaagaatttccttttctttcatctcatacagcttgtcgcctttgcggcgatagccgatatagtcgccgtcaatctgaataaatccctcatcgacccgttcgaggtgatttatggtgcgcagcagcgtggacttgcccgaaccggaagggccgaggatcaccgtcaccgtgcccgggggatctccagcgacacatcgtccagcgccttgtggcggccatagtatttgctgactccggtgatagagatatggccattatgagagctgggcatgagcggcctcctgcggctgtggttgacgtgcgggttgatccagacggctgctgcgggcgctgtttaccgccgagcggcgctcgctgcgcgccaggccccgttccaccagatactgaatggcggagaggacgctggtgatcgccagataccaggcggcgccgaccatcaacagcgggatcacctcctgggtacggttgtagatcatctggatggtgtagaacagttccggcatcgccaggacatacaccatcgccgttcccttggccagactgatgatctcgttgaagccggatggcaggatggtgcgcagcgcctgcggcagaataatgcgcagcgtgcgccgccaggcgggtagccccagcgcggcggcggcttcatactgcccgtggtcgacgccgagaaagccgccgcgaataatctccgcggtataggcgctctgcaccagggtcaggcccaccaccgccgtggagaattgccccagcacgttaatggtctgatagctggcccaggtcacgccggtaaacgggatccccagcgacagggtgtcgtagagataggaaaagttatagagaatgatcagcaccacaatcagcggcagcgagcgaaacagccagatatagccccaggcgagactgctgagcagccacgatgaggacaaacgggccagcgccagcaggccgccgaagatcacgcttagcaccgtgccgagcagggtcaggagcagggtttgccccagcccctcgaggatcaccgggtcgaagaaccagcgggcgaagacgccccactcccagcgcgggttaaaggccaccgactggatcaccaccgccagcaccagcagggcgaccagagccccgaccacccgcagcggatagcgcgccggcaccactttgatcgtttcagatgaatgcataatgcctcctcaggcgctgtggctgtaggcgctcaccgccagcgctttagtgaaccgcagccggccatcgtacggcggctgactgtactcttccgggtctctcgtgaggtcaaactgcgcctcatacccctggctgagatagagctttaccgcctccggctgacggaaaccggtggtcaggtagatatggctgtacccggccagcaccgcccgtcgctccagctcctggaccaccttcgccgccagcccctgctggcgcagacggcggtgcgtccagatacgtttgatctccgcggtgtggcgatccttcggcttatacgcgccggtggcgataatttcgccctcacgctcaaggacaataaacagcccctgcggtggcacataccactcacttaactccacttccgcatcgcgggaaaaatagtcgccgtagcgggcggcatattcggcaaacagcccgctaataatcggctgcagctccggagcctccggagaaatatcgcggaatgcttcgctcatcgcgcctcctgtcagtcgcccagtccgggcggattgatttccgattgcggaatgctttccaccccttcgccccagcggttaagcactttggcgtagtcccgctggcgatagccccgttcagcgccgcctggacggcattcaccagcccgctgtcttttttcagcgttaccgcgatatgcgccgctttcggccagccgccatcgacgctacccaccagtttggttttgccggtcagcgccgccttccacgcgccaatcacgttggggccgaagaaggcgtcggctcgtccggtctgcagggccagcgtctgggcggcatcatccttggtgtagaccgggataaacggctccagccccttcttgacgttctccgcgttccacgccagcaggatcgcctcctggttggtgccggagccgacaataatctttagcccggcgatatcttccgctttgtcaatcttgctcagcggactggtgcttttgacgtagaagcccagcgagtctttgcggtaggtggcgaaatcgaacttctctttccgctctttggtgacggtaatattgctgatcgcggcatcatatttgccggaggtgaccccagcggccagtcttcccatgaagtgggaaccacgtttacttccagcccgaggctctccgccaccagccgggcgatatccgcctcgctgccgagcagggttttgttgtcatcggcaaagaccgtcagcggcggagagttcagggccgccaccgcgacggtgaatttccccggcaccgccagatgcagatcttgcggcaacagggcaatggcctgcggatttttcgctgtgtgaatcggcgttttgttggcctccaggctcactccggtgccattgatcttgacgtcctgaccccacgatgaggcgctaaatgccaacgcgacggccagcaagagtgttgttttctgcatagcgtgattctcttttattatttttggaattgattagcgggtagcgccagacccagactttcccgcagggtggtgcccggatagtcgcgacggaacagtccgcgcgcctgtaacagcggaaccacctcatccacaaagcgcgggaaggtttccggcgtgccaccctgaataatgaagccgtccgccgcatgctgctcgaaccacagttgcaggccatcagcgacatcgctggcggtgccggtaaagcgcggacgcgggctggctgcctccagagccacctggcgcagggttaatccccgctcgcgggcgtgacgtttaatctcgtcggttgtactgcggaaactgttttgtcccaggtcgccaatatccgggaaaggttcgtcgagcgggtactgcgagaaatcgtggtgttcgaaatagcgcccgagataattcagcgcatcctcgatggagaccagcgccgcggtggtctggtactgccgctccgcatcctcggcgtcatccccgacgatgacgctgacgccctggaaaatatgcagttggtccggactgcgctgatatgcggcgagttggcttttgacatcccgataaaatgcctgcgcctcggccagcgagtcctgatgggtaaaaatggcatcggcgtggcgtgcggctaatttcttgccgtcgtccgatgcgccggcctggaaaataatcggtcggccctgcggcgtgcgggcaatattcagcggcccggcgactttaaagaaatcgccgtggtgatcgagcgtatgcagtttatttttatcaaaaaactggccagtctccttattgcgcacaaaggcgtcttcttcccatgaatcccataagcctttcaccacctgcagatattcatcggcaatgcgatagcgcagcgcatgatccggatgttgggcccgggagaagtttttcgccgacccctccagcggggaagtgaccacgttccaccccgcccgtccctggcttaaatggtcaaggctggcgaactggcgggcggtagtaaacggctcgctgtaggaagtcgataaggtccccaccagccccagtcgccgggtgatcgcggccagcgcggaaagtaccgttaagggttcgaagcgatttaaaaaatggggaatcgatttttcgttaatatataaaccgtcggcgacaaaaataaaatccagcttccccgcttctgcttttagcgccgtctgcgtgacgaaatcaaaattaatactggcgtccgcctgggccgccggatgacgccaggcggacatatttcccgatgcgccatgcaatatggttcccagacgcaattgtcgattttcagacatagctaccccttcccctgtcattcgttaaatgtgttgtaacgcttcttccgcgagacgggcgaaatagtgcgccgcgggcgcaatcagccgttcatccggattaaatgccggatggtgcaaaccatattcgctggcgctgccgatgctgacgaacgccccgggaatatgctgaagatagaccgcaaaatcttcgccaccgagatgcagatcggcatggtgggtgcgatacccggcctgggctgccacctcgctggcgaaatcggcccagcgggcgtcgttgaccagcgccgtcgggccggcgtaccagaagacgtcaatctgcgcgccaaaggcgctggcgaaaccggcggcaatctcgctgacccgggccttgacccgctgctgcacttcactgctgtgagtgcgcagcgtcccttccagctcgacgctctccggcagcacgttccaggtattgcctccctggatccgcgtcacgctgagcaccaccgagtcgagggtgttcacttcccggctggccacgctctgcagcaccgtcaccagctggctggccagcaggatcgcatcctttccttcatgtggacgggcggcatgcgcccccttcccggtcactttgaagacgaagcggtcgacgttggcgtagaacgcgccgccgcgggtggcaaattcgcccaccggcaggccgggctcattgtgcatgccaaagatcgccgacacgtcctccagcgccccggcgcggatcagggttttcgcgccgccaaaattttcctccgccggctgaaacaggatccgcacccgccccgggagttccgcttcccgctccttcagcagcagcgccgccccagcatcacgctggtgtgaatatcatggccgcaggcatgcatcaccccttcattttgcgagcggtaaggcagaccggtcgcctcctcgatgggcaacgcgtcgatgtccgcccgcagggcaatcaccttgtcgccgctgccgacttcggcgaccagcccggttttcagatcgaagggcagcagagtcagcccgccgctctgcagccagtcgcggatccgcgcggtggtggctacctcctgcagggagagctccgggttctggtgcagctcgcgccgccagctaatcagttgttgttcaaaggacattcagcacctccttgccgtagtgagcctgcgccagcaggcgcagggagtgcaggcgcgctggcccgtcgctaatggggtatcaatgatgagttcatccaactgttcttccgcctgcagcgcgtcaagccgggctttaacctgttcgggagtaccggagatcagtgaagattcgcggcggtggatgcgtgtcggccggctgccagcctggcgggcaaaggcgacggcctgcgcctcactgccgacggtcacccgctggccgttctccagctcgacgccccacacctcgacctgctgcgccagcgcggcggcggtggccggatcgtcggccaccaccacctgcacggcgacaatcgcctcacgcgggctgagctcgcgccagcggttgatcaccgtgcggcgcagcgcgctgtcgccattgagatgggccgcaaacacgaagttccagtcaagacgggcggccagttcagcactctccaggctggcgccgagcaggaaaccgtcggcccgacgcggcgggatcggcgtggcgcgcaggctctcctctccaccgggctcagtcagcgacagccagttatccagctgcgccagctggtcggcaaaggtccctttctcctcctgatgcaggccctgctgcagggcgcgggtggaaagcggcagtccgccaggcgctttgccgacgccgagatcgatgcgacccggcgcgagggcggccagcaggttaaagttttccgcgaccttataggggctatagtgctggagcatgacgccgccggacccaagacgaatgcgccgggtgtggcccagcagccaggcgataaccagctccggcgaggggctcgccagctgatcggtattgtggtgttcggcgacccagaagcggtggtagccccaggcttcggcgtgttgcgccagcgttaatgtacgcgccagcgcctgcgcggcggtttccccggcggcaagcggacttttatccaggatactgattcgataagacatttcgcaggctcatatgaaagtacgtgcctgcattattaaaatctcagctaactattgagaaacaattaattcacatgtgtactgctgaaaattagatatgcccgcctggccgctgcgcttccagctcgcggagcagcgcctcagcctgccgcggactgcgcacccggacgaagcgaatatgacgatattgcggatcctgcatatcggccagatagcgtcggcgattctgccgccaggttttcagcgtccagaggataatggattcccggctgcagaacgaacggcgaaagctctcgcggttgcccgtgcccggccacagctcctgatgccgccacgcccggctcgtcgcccgccacaccgcctggcgcagcgtgcgccagaaaccataatctacccagatcaccaaatccaccgcacgccatttaacgctgcggctgcgattgtaattgccatccagcacccagcccggcgtggccgtcgcggcggcaatggcggcgaaaaatgcctcatccggcgcgccctgccagttcggccgccagtacaggcgatcgagctcgatccagggtaattccagccggtgcgccaggcgccgggccaaagtggatttgcctgagccgctggtgccgaccacgttgatattcatctctgtttctcccggttaccagactctgcctggcgatactcttgatcatctttcgggctgccgtccccccggtcatgccgcgccagcgaatgtcggttcacctggcgctggcgttttttgggcctattacaatacctgccctgcacagaggaataaatcatccgccataaccattctgctccactgcgtccggccatcaggctggcacaatcctcaggccgggcatacactctgcgtacctgtgagcagtattcatcaatccggaaagattatgctaaaagagaacgtaaacgatctgctctcctttatggtggtggcgcgtgaacgcagctttacccgcgcggcggcccagcttggcgtgtcgcagtcggcgctcagccatgccatgcgccatctcgaaacgcggctcgatgtccggctgttgacccgcaccacccgcagcgtggtgccgaccgaagcgggcgagcgactgattcagcgcctcggtccgcatctggaagagatcgagcaggccctggctgcattgcgcgacacccgagaacgcccggcgggcaacctgcgcattaccgccggggagcatgccgccagcgcggtactctggccggcgctaaagccatttatgctgcaatatcctgatattaacatcgaaatcactgttgataatgggctcacggatatcgtgggtgaccgcttcgacgccggggtgcgtctcggcgaacaggtggcaaaagacatgattgccgtgcgcatcgccccggatatgcggatggcggtggtgggttcgccggcctatctgcagcgggccggtacgccgcaaacgccctgggatcttgcccaacatcgctgcatcaatctgcgcctgccgacacgagggggactttacgcctgggaatttgcccgcgatgaccgggagattcaggtgcgggtggagggacagctgatcctcaacagcctgccgcagcgcatcgacgcggcggaggcgggccttgggctggcctacgttccggatgactgcgtggcggaggccttagccagcggccggctggtgcgggtgctggcggagtggacccccgccttccccggctaccatctctattaccccagccggcgccagcataccagcgctttcacgctgttactggaaactctgcgacgctgatctcattgataaatctgtcaaatgctctcggtaaatgttttaggtgcgtaactattaggttacgtgtaggattcagcgccatgtctgagcttatctcctacgtcagaatgatgagaaagccagcataatgtgccagccgtcctccattccggctgcaaacatgggcattgacaggaaactgatacatcaatgaatacgaaacacgaaaatgcagcggagcatcatgctgcaaaacgccactggcttaactcacatgaagcgggttatcacaaagcgatgggcaaccgtcaggtacagatgatcgccatcggcggcgccatcggtaccggtttgttcctcggtgccggggcacgtttacaaatggcagggccagcgctcgccctggtctatctggtctgcggcatcttctccttctttattcttcgcgccctcggcgaactggtcctccaccgcccctcgagcggcagcttcgtctcttatgcaagggagttcctcggtgaaaaagccgcttacgtggccggctggatgtacttcgttaactgggcgatgaccgggattgtcgatatcaccgccgtggcgctgtatatgcactactggggcgcgtttggcgatgtgccgcagtgggtcttcgccctcggcgcgctggctatcgtcggcaccatgaatatgatcggcgtgaagtggttcgccgaaatggagttctggttcgcgctggttaaggtgctggcgatcgtcgcctttctcgtggtcggcaccattttcctcggctccggtaagccgctggacggcaatgccaccggcttccatctgatcaccgataacggcggcttcttcccgcacggcctcctgccggcgctggtgctggtgcagggggtggtcttcgccttcgcctccatcgagctggtggggaccgcggccggagagtgtaaggatccggagacaatggtgccgaaggccatcaacagcgtgatctggcgtatcggtctgttctatgtcggttcggtggtgttgctggtgctgcttctgccgtggaacgcctaccaggccggacagagcccgttcgttaccttcttctcaaagctgggcgtgccatatatcggcagcgtgatgaacatcgtggtgttaaccgcggccctctccagccttaactcgggtctctacagtaccgggcgtattctgcgctcgatgtcgatgggaggctccgcgccgaagtttatgtcgaagatgagccgtcaccacgtcccttacgccgggatcctggcgacgctgggggtatatgtagtcggggttttcctcaactatctggtgccatctcaggtatttgagatcgtactcaacgtcgcctcgctggggatcattgcctcctggggctttatcgtggtgtgtcagatgcgtctgcgcaaagcgatcaaggaagggaaagcggcaaaggtcagcttcagaatgccgggggcgccgttcacctcctggctgacgctgctgttcctgttcagcgtgctggtgctgatggccttcgattatccgaacggtacctacaccataggatcaattccgctgctggcggtattgctggtggctggctggtttggtgtgcgtaaacgcgtgcatgagattcacagcacggcgccgacgctgaggaagtaactggcaggactcccggtttgtccatcgcgggcaaaccgggaggtcagaacttaattatcttcaaccagctgcgacacatcgctgctgttaatttcccgcttattacctgactcatcgatatagctggtcatccccgtttctttatccagctgcggcttgccgtgggtaacgatagtttgaccgctcttcgtggtcataacgtagtttgacgaacaacctgccagcagcgccagcatcgcgccggcgcaaatcaccatgaatggctttttcattttatctccactgattaccactgcccgcacgtggcgggaaagggttaagtgtataaccatctggtttgtcaggccaataggcgtttgtaacagagggtgagtcgccgggcctggcccggcggcatgcggagcgcgaccaccgttttccggtttcgtcgcgctgaggtcttacagggcgatgcggatcacatcgtccggcgcggtggcttctttctcacggctggaagcctgtttcacgctaacgtacagcgtttttccgtcctcggagagcgccaggctgttggggtgagtcggcgttttaaaggtcttcaccaccttgtagctcttgccgtcgataacgctgacttccccggccttacgatgcgtcacataggcttcgttgcgcgccgggttaaacagtaccgccagcgactccggcgcggcgattttctccagcaccttgccgtcgcgggtatcgaccaccagcacttccggctgcttgctgtcggtaataaaggcacgatggccggcggtatcgagactcaggttaagatagaaatgcgctttgccgtcatcctgcaattttttgcgcgacgcaatcgtgttgctctcgctgtcgatggtcagcagttcgccatcggcgttggtggtatacagacgcttagcctgcggatcgatcgccagacccgtcgccattgccccggtgccggtaatggtcgttttcagcttcagggttgcgccatctaccacccaaatcacgctctctttgcccagaccggtaatgtagaccgtgttggtctgctcattgaccgccagctcgcgcggctgcagcggacgcacggtttcgctgcgctgacgctcgtccagcaccaggcgccccttcacggcgccggttttggcgtcaatagcggtgacagtgctgtcgacggtattgccaaaccacagcgtgccggtggcatggttgatagtggcgccgaacggcttcagatcgttgtgaataatctgcgtcacgtcgagggttgtggggtcaagacggtaaaccaccccgcctttgtccagcgaacgactctgtgatgtggcgacccacagcgcattctcctgctggctgtaggccatttcgtaggccccttttccgacggccttgcgcagcatctcttccgcggcgtgggcgctaaagctgcctgccagcagcagagaagtgacgagcagtgaatggcgcagacgcggcgcggcaaaatgacgtaatgacatgacgactccctttgataaaccagtatgtgctgacccgacatcgcttccggcggtaaagtcctggctttacccttatttttgaatgcgaatagtaatcattatttatatcaaagtggagcgttaattgttgttgtgcggtaaattcatgcttggcgagcactatccgttaaccagcagcagttaataattttcaaatattttacaaacgaggtaacatatatacatatgttccatttggttcgtctttgagtattatcgatgaaaatcctgtccgtgcgtcacgccgccctcccggccctgctcttgccgctcattgccgcagcccaggccgctgatgaacaaaccatggtggtgaccgccgcgccaaccacggtttctgaactggatacccccgccgccgtcagcgtggtgaatggggatgagatgcgccaggccgcgccgcgcgtcaatctctctgaatcgctgggcgccgtgccgggcctgcaggtgcagaaccggcaaaactatgcccaggatctgcagctgtcgattcgcggctttggctcgcgctcaacctatggcgtgcgcggactgcgcatctatgtggatggcattccggccaccatgcccgacggccaggggcagacctcaaatattgatatcggcagcgttgacaccattgaggtgctgcgcggccccttctctgccctgtacggtaactcgtccggcggggtgatcaacgtcaccagccagaccggcacccagccgcccaccgtggaagccagcagctactatggcagcttcggcacctggcactacgggatgaaagccactggcgccgttggcgacggcagccacgcaggcgatgtggattacacggtctcaaccaatcgcttcaccacccatggctatcgcgatcacagcggcgcgcgcaaaaatctggcgaacgcccggctgggggtgcgcatcaacgacgtcagtaagctgactctgctgctgaatagcgtggatatcaaagccaatgacgccggtggcctgaccgccgatgaatggcgcgataacccgcgccagtcgccgcgcggcgaccagtataatacccgcaagaatacccgacagacccaggccggcctgcgctatgagcgccagctcagtgcccaggacgatctcagcgttatgatgtacgctggagaacgtgaaaccactcagttccagtcgatcccgcgcgcgccgcagctgaagccgagccatgccggcggggtgatcgaccttacccgtcactaccaggggatcgatacccggctgacccatcgcggagagctgctggtgcccgtcacgctcaccgccggtctcgactacgaaaacatgagcgagcggcgcaaagggtatgaaaactttgtgatggtcaacggcgcgccgcagtatggcgaacagggcgcgctgcgccgtaacgaacgcaacctgatgtggaacgtcgacccctacctgcagacccagtggcagctcactgacaaactctcgctcgatgccggggttcgctacagctcggtatggttcgactcgaacgactactacatcaccccaggcaatggcgatgacagcggtgatgccagctatcacaaatggctgccggcgggctcgctgaaatatgccctgaccgacgcgtggaacgtctatctttccgccggccgcggcttcgagacgccaaccattaacgaactctcctaccgctccgataaccagagcggcctcaacttcggcctgaaaccctccaccaacgacacggtggagatcggcagcaagacgcggatcggcaatgggctgttcaccgccgccctgttccagaccaataccgataatgagattgtggtcgacagcagcagcggcgggcgcaccagttataaaaacgccggcaagacccgccgtcaggggatggagctggggctggatcagcagtttggcgagagctggcgtctgaaggcggcctggacctggctggacgcgacctatcgcactaacgtctgcgacgacgccagctgcaatggcaatcgcattccggggatcgcgcgcaatatgggctacgcctcctttggctatcagccggagcaaggttggtacgccgggagcgatattcgctatatgagcgatatcatggccaatgacgaaaacaccgccaaagcgccctcctggacggtggttggcctgacgactggctataaatggagctacggcaggatggatatggatctgttcggtcgcatcgacaacctgttcgaccgggagtacgtcgggtctgtcatcgttaacgagtctaacggacgttactacgagcctgccccgggacgtaactacggcatcggcctgaacctcgcctggcgcttcgaataacacgccccttccccgccgatgcctctcgcgatcggcgggcgaagcgcttttccttaccgtctattccaccgccaggcggacacccgccaacgacccgcgcttgacactccacccccttcgtagtcatatagccacaacataatcaccatggttactatttatattgatcggcacttttatcagccagggagggataaatggataatgtcgtttatgcggactgcgtattgattaacggcaaggtcgccacggtggacgcacattttagttttaagcgcgccatcgccgtgaagcagggatggattattaacgttggtgaagaccaggatattcagcagcatattggtccccagacgcaggtcattgaccttaagggcaaactcattttacccgccgcacatgactcacatatccatatcggctggctcgctgacagctggcattgcctgaactgccaggacgtgcgttccctggcagtactgcgggaaagactgcgcgaccaggcagcccgcactcccgccggggcatggattcgtgtctgcggtctggatccaaacgcaatcaaggagtgtgcggccgagcagcgctctctgacgcgctgggatattgacgacgtcacggccgatcatcccaccctgctcgccctgtgggacggtcactcctgcatcgtcaacagccgggcgctggccctctccggtcttgacgccagcacccctgatcccctcggcggacatctggggcgaacggccagtggcgaactggacggcaatttcatcgacctgcccgccctgcatctcgcatccggcacgatgccccgtctgaccgtagcggccctcaaagagaaccttctggcagcccagcgcctgatgaacagcgaagggtatgccagctacacggaaggcgccatgggtccgggggaaaacacgcgcgaggtgggcgctgcgggggatcgcgccatcgccgcctaccgtgaactgcaggatgaaggaaaactcaccgcccgggtatccatcgccttttactccgccgagcggggcgttcagtcctgcgccaccctgaagcgcgatctggatagctttgatttctcccagttcaccgaccgggactggctggactgtcggaccataaaactgttctgcgatggcgttcccacatcgcacacagcgtggatgaatcaggattacgccgaccggccgggatatcgcggacgctcggtgtttggtggccccgaggcgaccgaggaagcacaagttgaggcgctaaagcagatgattctgctggctcaccagcgcggttttcaggtggcagtccatgcggtcggcgataaggcggtaaaagtcacgattaacagcttcgtgcaggcgattcagcgctatccgggggagagccgacggcattatgtgctgcacggctcaatgggcgatcggcaagatttcgtgatggcggcaaaatacggcattctgctttccgaacaaccctcacccggcggcccggcatatgactatgaacagcgcgcccgctactgtggcatcaagggggaaatctgcaaagggctacgggatatcatcgaccttggggtcatcgtcgccggcgggtcagatggcattatggcgctggtgaactggcgcaaaatggttcaggcagcggtcacccgcaaatcatcttccagcggcaacgttattcgcccggaactggcaattagcgtggcggacggcgtgcggatgtacaccatcaatgcggcctatcaggaagggaaagaagcggtacgcggatcgatagaggtcggcaaagtcgctgattttcaggtgctggaccgcgatatcttcgccgtagcccatgaggagattggcgccagccgcgtggtgatgaccatggttggcggaaacgtcgtctttcaagactaaccgcgctcacccggctcaggtcgccgggcgggcagcgtgcagcatcagcggaaggcgtctgcccgccagagcatcgcgcttccgctacaggagcgaattaaagcagatttcgcagggataactcgaaaatgatcttttctgcctggcaggagaaggcgatggagaggtcgagtttcactgcgtcgccagcggcgacgatggtgtaatcgacatgcggcggttcactggccggcgctgcggcggcagcacgttcgcgcacggcggctacggtggattccgcttcttcgcggtttgggaacaccttctcggcccggtagacgcagtcctcgttatcaatgatcgtcccgacatcaatggcgcagcctttggtgctgcatttatctactacatctttcatcgtaataacctcttgagttttcttaaggataagaacccgcccaccgaaaagcaaaccattaatatccgtaaggattagcaatttttctattatatcgcgtcgcgccgggcgccatcttgcgccaccgcaaaacgtggcaccatgtttacggacggtcgcgtaacgatacgcgttgcctcgcagcaatcgtggtctccatcacactattctgcacaccatctcgtctgccccgactcgcagcgttagtctggtcacagaacatcgccaacaaggagctgctatggcactgccgattatgattgattgcgatccgggacatgatgacgcgatcgccctggtcctcgccctcgcctcgccggagctggaggtgaaagccgtcaccgcttccgcgggcaaccagaccccggagaagaccctgcgcaacgtgctgcgtatgttgacgctgctgaaccggccggacattccggttgccggcggcgcgtggaagccgttgatgcgcgatctgatcatcgccgataacgtgcacggcgagagcggactggatggcccgagcctgcctgagccggcctttgcgccgcagaactgcaccgccgtcgagctgatggccagcgtgctgcgggaaagccaggagccggtgaccctggtggccaccgggccgcagactaacgtggcgttgctgctcgccagccatccggagctgcacgcgaagatcgcccgcatcgtgatcatggggggcgccatggggctgggcaactggcagccggcggcggagtttaatatctacgttgatccgcaggccgcggaaatggtctttcagtccgggatcccggtggtgatggcgggccttgacgtcacccataaggcgcaaatccttcccgccgatatcgagcgattccgccagattggcaacccggtgtcgaccatcgtcgccgaactgctcgacttctttatggcctaccacaaagatgaaaagtggggcttcgacggcgcgccgctgcacgatccctgcaccatcgcctggctcctcaagccggagatctttaccacgatcgaacgctgggttggcgtagaaacggaaggcaaatatacccagggaatgacggtggtcgattactaccatctgaccggtaatcggcccaataccaccctgatgctggatgtggaccgcgaagcctttgtcgatctgctcgcccagcggttagccttctacgcctgacctctatgccaggcccctttaccctggcggaaaaaggggcctgttaagtcgaagcccgccaggttagtcgtccgccgcgacgcggatcactaccttaccgaagttctcaccttttaacaggccgatcagcgcctgcggcgcctggtccagaccgtcgatcagctgttcgcgatatttaattttcccctcctgcacccagcgccccatctgctgctggaactcggcgatccgatgcccgtaatcctggccgataataaagccctgcatccggatgcgctttttgaggatggtcgccatcagcagcggcagacgatctggcccgtccggcagcccggtggcgttatagccgctcaccagcccgcagacgggtacccgcgctgcggtattcaacagcggcagcaccgcgtcaaaaaccttgccgccgacgttttcataataaacgtcaataccctgcgggcaggcctgggccagctgttcggcaaaatcatccgcacgatggtcaaggcagagatcaaagcctaacttctcaaccgcatagcggcatttttccgcgccgccagcgatgccgacggtgcggcagcccttaattttgccgatctgtccaaccgtggcgccaaccggcccggtcgccgcggcgaccaccagcgtttcgcccgcctttggctggccgatgtccagcaaacccatgtaggcggtgaagccgggcatccccagaactcccagcgaccaggacgggtgttgcggattgtcacccagcttcaccagtccgctgccgtcggagagttcataatcctgccagccgctgtagcccagcacccagtcgccgggttgataatcggcatgatttgagctgaccacgcgactcacggtccctcccaccatcaccgcgccaatggccaccggcggcgaataggacggcgcgtcgctcatgcgcccgcgcatatacgggtcgagtgataaataaacggtacgcagcagcacttgacccgggcctggcgtcggcacttcgctctcttccaggcggaaattctctgccgtcggttcaccatgggggcgggaagccagtacccagcggcgatggcgttgcggttgatctgtcatagcaaactcctcttgttagcagactgtactgaggctagctgctttatgcgcaacgtgctttaccattaagagccggatggcgattgattaaggcgaaccaccagatagacgcaggtctctgcggattcattaataaagcgacaatcgttgggcgggccaagctccagacaatcccccgcctgcatctcatggcgggtattgccttcgacaaacaccagctcgccctgttgcagccagattagctggcgggcaagcgcataggacgcggcgggcatcggcacatcgctaccgggcggcagctcaatctgcaccagatcgatcggcaaatcgctgcgcggcgaaacgtggcggcggagatagtggctttgcgggtcgcgccataccggctggctggcaaagcgcagcagcttgccctcctgcatttccgcgcgggcgatcagggtcgacatactgatgccgaaggcgccggaaaggcggcccagcatcgaggcggtcgggctgctttcgccgcgctcgattttatggatcatcgcccgcgaggcgccggcccgttcggcgaggtcgttcagcgaccagccgcgggactcgcgctcgatgcggatgcgcgcgctgatgcgctgattgaggttgtcttctatagtattcataacgtaacactatagtgtgcgcccccccattacacaaccatccaccgagacgcgttattcccgggttagccgttaaaattatgctgaaaacggatgacagcgtgacgttcattattgtaataatattgtactactatagtgtacgaaaaattgaggtttgctatgtccattcgccctgccattaaagacgactgcgcggcgatcgccgagatctataaccatgccgtcgtccataccgccgccatctggaatgataaaactgtggataccgataaccgcatcgcctggtttgaagcccgccagctggctggatttccggtactggtgagcgaggaagacggcgtcattaccggttattcctcgtttggcgactggcgggcgtttgacggctttcgccataccgttgagcattcggtgtacgttcatcccgaacatcaggggaaagggctgggccgcaagctgctggtcgccttgatcgccgaagcgcgacggctgaataaacatgtgatggtcgccggcatcgagtcgcagaatcacgcttcgctgcatctgcatgaaacgctgggctttatcaccaccgggcagatgccgcaggtgggcaccaaatttggccgctggctggatctgacctttatgcagctgcagctggatgcgcgtcaggacccggacggcaaagcatgaacgcgtcgctcactctcgcctgcctgatcgccgccggcgttggcctggtagtgcagaacactctgatggtgcgcatcacccagtcggcgtcgacgatccttatcgctatgctgctcaattcgctggtcgggatcgttatcttcgtgacgatgttactgctgcgccagggcgtcgccggctttcaggagctggccctgagcgtgaaatggtggacgctgatccccggcctgctggggtcctttttcgtcttcgccagcatcagcggttatcaaaacgttggcgcggcgacgaccattgcggtactggtggccagccagctggtgggcgggttgatcatggatttagttcgcgcccacggcgtgccggtgcgggcgctgatcggaccgttatgcggggcggtgatgctggtggtgggcgcctggctggtggccagacgccagttctgagcgcatcttcagaggatcgcgccgcctttggtcaactgctcgcggcgcgcgtcctgctcttcctgatgctgtcgcccatgatgggcgatggcggtgcgcagacgctgctgttggatatagcgttcctcacgactgagttgcgcatcatcactcagggcgattagcagctcattcatatgcgcgataacgccctcggccagggtgtcatcgactttgacgataacctcatccagatgtgccatcctgttctcctttcgcttaattcagcttcgctttggaaaaatcgctccccatcatgctgacggtgtagccgctgacgttgctgcgcgtcgcatagaaggttttcccggtcgccagggtgatccatggcgcctgctgataaaaaatctcctgcgcctgttcgtagagtttggcccgcgcctgcggatcgctcaccaacagcgctttctttaccagcgcgtcataggatttatcacaccagcgggcggcgttggagccagtctggatattatcacagctgagcaatgtgccagcaaagttgtccggatcgccgttgtccgacatccagccatacagggcgctgtcgtgctcccctttacgcataccggcaaggtattcgccccattcatagctgacaattttggctttcacccccactttcgcccagtcgttttggatcatttcggcaatgcgttttgagtttgggttgtaggggcgctggaccggcattgaccacagggtcacttccgcgccttgctccagaccagcctgcttgagcagcgctttggctttctgcggatcgtagtcatagtccgggagatctttcttatacccgagcatcgtcgacgggatcggtgatttcgccacgctgccggaatcgaggaataccgccttgacgatcgcctgcttgtcggtagcgtagtttaatgcctggcgcaccagcacattatcaaacggttttttctcggtgttaaacgccagatagccgacgtttagcgcctcaaccgcatgcagcgccagatctttattgcccttaatcaccgggaactgtaccggcgacggcgcgggaataatctggcactcgttggtctgcagtttcgccagacgagtctcgacgttcggcgtaatggagaagattaagtgcttggtcggtacctcgccttcccagtagtggggattggcaatatagcggatttgcgaatccactttatactgctgcagcgcatacggcccggtaccgacaggccagttatcaacgttttccggcgttcctttcttcagcatcgcctcaccatactctgccgacagaatagaggcgaagtccatgccccagtcggcaagaaacgccgcgttcggctcgttgagctcgaactggacatggtaatcatccacctttttcaccgatttaatcagcttatcgaggcccacgtcgtggaagtattcatagttcccctgcgacaccttatgataaggatgctgaggatccatctggcgcagcacggagaacaggacgtcgtcggcgttaaaatcgcgggtcggtttgaagaatttgttgctgttgaacttcaccccctgacgcagagtaaaggtccaggttttgccatcctcagagacgtgccactcggtggccagcgacgggatcggcgtatttttcaccgggtcaaagctcaccagacggttatacagtacctgcgagctggcgacgaacgacggaccggagctggcgatctgcggattgaaggactccggagaggcttctgagcagtagaccagagtgtcattgcctgcggcccaggcggcgccggccggcagcagtgcgctcagcagcagcgccagcgtggttttccctgtagacatggttataagtcctgattattgattataagaacagtaataacagcacagccgcctgacggcggcaaataatcaatggctatcaccttatgcaaaacgcgtggaatttgctggtttaatcgacgttgcgctgctttttacgccagagggcttcgggatgttgtgagccacacaaaattcctgcaaaaaaatgtgcgataaccgcccggctcacgcttcccgtcagtgccgcccggtacactgggggaaccgcagaacaagaggtttccaccatgacaatcacctgcaatctgtacattgacggccagtggcacgatgccgaaggccgccgcacctttacccgacgccacccggcccacgatgaggcagcctcggtggccgctgccgccagcctcgccgacggcaaacgctgcgtcgaagccgcggcctgcgcctttccgctgtggcgcgatactgcgccggcggaacgacgtcgcttactgctcgaggcggcggaacagatgctgttgcgggaggcgaaatttatcgccgccatggcggcggagaccggcgcgaccgcgcactgggccggatttaacgttcatctggcggcagatattctgcgtgaagcggcggcgctgaccacccagattgaagggcaaataattccgtccaacgtgccgggtaacctggcgatgggcgtccgccagggggcgggagtggtgctgggcatggcgccgtggaacgcgccgctgattctggccacccgggccctggcgacgccgctggcctgtggcaacacggtgatccttaagggcgccgaactttcccccgccactcagggactgattatcgacgcccttgacgcggcgggcttcccgccgggcgtggtgaactatcttacctgtgcgcctgaagatgcgccggcgctggtggaatcgctgatcgcccacccggcggtgcggcgcgttaactttaccggctccacaccggtggggcgcattatcgcccgcacctgcggacagtatctgaaaccagcggtgctcgagctcggtggaaaagcgcccctgctggtgctggacgatgctgatattgagcaagcggcggcgggcgctgtttttggcgccttcgccaacgccgggcagatctgcatgtccaccgagcgcattattgtcgacaatgccgtagcggaggcgtttatcccgctgctggccaggcgcgccgccgccctgcctgccgccctcacgggcccggttgtcgatatgaacaccatcgcccgctgcaacgcgctcattgacgatgcgttagcgaaaggcgctcgcctgctgaccggtggtagagccaacgatacccatatgagcccgaccctgctggacggcgtgacccgcgagatgcgcctgtggcgtgaagagtccttcggtccggtgaaagcgattattcgcgttcatagcgaagaggaggcgctggcggtggccaacgacagcgagtacggtctttccgctgcggtctacagccgcgacagcgccagagcgtggaacgtagcgcaacgtctgcataccgggatttgccatatcaatggcccaacggtgcatgatgaggcgcaaatgccgtttggcggttgcaaagcctccggctatggccgctttggcggccgggccgggatcgcggaattcaccgagctgcgctggataacgatccagacccaaccccgcgagcttcccttctgaggcccagcgcctcttaactatggctggcgataagctgcgccagcccctgcgggttttcccacgccatcgagtgtccggcatggggcacgatgccgaccgggatcccttgtgcctgaacgaggtcgctatccgcataaggaagcgaccgctctccgacgatcagcattttctggcagcgcagctggcatagctgggtaaaccagggcgtgtcgctgccgcgtatcaggctgctggcggcccgccagacggcccagggggcgctgttttgtaaacaacccgcccacggcgagcgctcctccgccagcagcctggcatagccgtcagcgacaaaggctgtctctgactgcgccgcaatgcgcctgctgtactcgccgccgccggcgaacaggttgggttccgagaccaacagcgtgggcacccgctcgcccagtagccccgccgcttcgatggcgatgctccctcccatgctatgcccgaacagcgcgaagcgctgcaggcgcaggtggctgaggaactgctccaaaactaaagcctgctcatgtatgttgtaactaaacgcgcgcggtttatcgctatagccgaagcccggcagatcgatgagtattttgcgccgttcgcggagcgcaggatcgctggcaatgcggggataatcgtaggatgacgcgcagccaaggccgtggataaacaccaccggaaggccatctcccgggaaatcgtgccagcgcagcgtggcgccagcgacggacgaataaaaaccgttcacctgtatgcctccatgataaggttactggttttttatacagtaacctcatcctttgtgctacccttttctgccgtctagcgcctgagggttaaaacagcgagacgagcagcgccatcgggaagctgaacggccaggtggcgccgatcagcagggccgccagcaggcggatcatccggctctctttggttaaaaaccagctaatcacggcgcatatcacgcccataatggcgtaaaacaccaacattttttgatataacgtcattcttactttttccttccctgaggggcgttccatggtgggatgattatctgccatgacgtcgtgattcagagatacctgtataacaaaatcagaaacgggctgaatattcagaataaagcctgattcgtcttaatctgatagcgcaaccgctggcgccgtactatacctttaggacttactcattagggtggcgctatggatgtctccagtaaaaccgtcgttatgattaatgtctgcgccgcgttcgcgcttatcagcctgctgtccgtaagatttggctggttttaatcatttaattcagcaacgaaacctaaaaaagcagccccgaaggctgcttttttacgcgcgaacaacagagttgttatcttgctgtcgggcggcgggggctaactgcgcggcagctattaccttattaagactggggttatagcgcggcagtacattgactttttcactatcccattcggcggcggcgcagacggcctgccctacgcccatcttctcacagctttggattcgtttcgccggggcattaccatagctcagcgccacagcgccgatagccagcagaataaaagcaaaaattttcacagcgacatcaacgtcaaaacctaatatgccctaaatgatcgcatgagcggcggcggaaagtcaaacccggggcgcgctgccgggcggcatccggtatttgcctctgcctcagggctataaaatattcagaacaaatatcatgcgataaccgtaaatattaaaagcttatctctagccgtgaaatactttctgttcaggggagttaatttcgctaataaggaaaatatttcgccgtcggcaaggggaaaaggatcgccgccttcgccacaggcgcaatatatcgcgcgggccgtcatcgtaagaagataaatggcgatggcaagccgttgtaacataacctcttcatctccgtcatcacggataagagccagaaatagcgctaaatgacaacaaatatcatttgccttcgcgtcagataatacttacattcataaccattggtaatgctttagcgcagttcgcgctgtgaatttcgaggtggatatgtccggaatcatcacgctggtcatcgcgctaatcctgctggtcgcggcggtgtataatcttatttcctacattcgtgaccggcgcagcgccagcctgcccagcaaaaaaaccaagcgctgaaagtagttaaagcggtattctcgttaccccggcgcgactggccggctcatctcttcgctcttctgcgagcacaaaaaagcccctgccgacagacaggggccgcaattcggtcgcgaaccgcgatgttgccgccccacccgccgggcgctgtgcgcccagggtgactggcggaccccatccggcgcttatctccggcactcatgatggcttagctcttgaaggggcatcagaataatctcatatcccctgggttgagttttgacaatttttgccattgtgactattagcggcctaacacacccatcgcgcaatagtcgcctggcgctaaatggtcaatcctttagctatgcttaaccatcacatggcggaccacggtataatcctcaaggccatacatcgacatgtccttgccgtagcctgacagcttctggccaccgtgcggcatttcgctgaccagcataaagtgggtattgacccaggtgcagccgtactgcagcctggcgctaagacgatgggcgcgaccgacatctttcgtccataccgaggaggccaggccatactgagagtcattcgcccagctcagggcctgcgcttcatcgctgaaaggcgtcacgctgactaccggaccaaacacttcgcgctggacaatagcgtcttcctgccgggcgccggcgagcagcgtcggctggaagtaatagcccgcgccgtcagcccgactgccgccggtgaccactttaatgtgcggcagcgcccttgcggcttccaccgccgcgctaacgcgctcaagatgggccagcgagctcagcggacccagttcggtggcagcgtcctccggcgcccccattttcaggctggccaccgccgccccaagtttctccaccagctggtcatagataccctgctgggcgtagatccggcaggcggccgtgcagtcctggccggcgttgtaaaaaccgaaggtccgcaccccatccaccaccgcatcgatgtccgcatcgtcaaaaacgatcactggcgccttaccgcccagctccatgtgggtgcgtttaatcgacgaggcggtatggccaatgatatgggctccggtggcaatcgatccggtcagggagaccattcgcactttaacgtgggcggtcaaggggtcgcccaccgttttaccgcggccaaacagcacgttgataaccccctccgggaagatatcttttgccagctccgccagcttcagcgccgtcagcggggtgatctccgagggttttatcactacgcagttgcccgccgccagcgccggggccagcttccaggccgccatcatcagcggatagttccacggcgcgatggaggccaccacgcccaccggatcgcggcggatcattgaggtatgcccttcgagatactctccggccgccatccccggcaggcagcgagcggcgccggcgaagaagcggaagacgtcggcgatggccggcatttcatcattaatcacgcagtgcagcggcttgccgcagttcagcgactccagctgcgccagggtttcagcctgcgccgagatggcgtccgccagcttcaggagacattccgcacgcgtcttcggcgtcgtctgactccaggcatcgaatgcccggtccgccgcctcaacggcggcatcgacctgggccgctgtcgcttcggcaatctccaggatcacttcgccggttgcagggttatataccggaaccttctcgccttcacctgccactaacttaccgtttatcaataggttgtgttgcatagcattatcctgtttcatggttttatttcccgtttccggcgtcgttatcgccgtcgcgggtgagccaccaggcccctaagattggtatcgtcgttaccagcatcaccaacagcgcgacaacgttggtgacgggcacatctcgcggccgccccagctgattcagcaaccacagcggcaaggtgcgttcatgccccgcggtaaaagtggtaacgataatttcatcaaacgacagagcgaatgccagcattccccccgccagcagcgccgaccccagattgggcagcactacgtaacgaaaggtctgccaaccggtagcgcctaaatccatcgaggcttccaccatactccacgaagtccggcggaagcgggcgatgacgttgttaaacaccaccaccacgcagaaggtcgcgtgccccaccacgatcgtcagcaggccaggctcaaggccgaccgctttgaacgccgtcaggagtgccaggccggtaatgatccccggcagggcgataggcagcagcagcagtagcgacaccgcatttttgccaaaaaaggcgctgcgccacagggctcctgcagccagcgtgccaagcactaaggcaatggcggtcgacagggcggcgatcttaagtgacagtgtcactgcctgcagaatgtcgctgcgcccggccgcctcgctgaaccagcgcagcgtcagcccctgcggcggaaagctaaaggctgcatcttccgtattaaaagcatagatggcgataatcagcagcggaaagtggaggaatatcaccccgccccaggtcgccagtcgcagataccagggcgcgcgttcagagtgcatcgaaggctcccagacgtttcacgaacgccagatagagggcaatcaagacgataggcaccagggtaaacgccgccgccatcggcatattgccgatcgccccctgctgcgagtaaaccatattgccgataaagtatcccggcgggcccaccagctgcggcacgataaagtcgcctagcgtcagcgaaaaggtgaagatcgacccagcggcgatgccgggaatggccagcggcagcaccacgtagcgaaaggtctgccgcggggccgcgcccagatcggccgaggcctgtagcaacgatcccggaatacgctccagcgccgcctgcaccggcaggatcataaacggcagccagatgtagacgaacaccagaaagcgtccaaggccggaggtggacaaggtattgccgccaaccgccgggacgctcaacagcgcgttcagcgccccctccagtccaagatgaccgaggaaccactgcgccacgccatctttcgccagcagcagcacccacgcataggctttgacgatatagctggcccacattggcagcatgaccgcgatataaaagaaggccttcattttgccgctggtatagcgcgccatataccaggccatcggcagcgccagcagcgcgctggccagcgtgacgcacagcgccatcaccagggtccgcacaataatgtcgtagttggcagggttgaacagcgcccgcaggttagccagcgtgaagtcgctggtcaccgacatggtgaagtcgtcaaaggtataaatgctctgccacagcagggtcagcagcgatcccagatagacgatgccaaaccacatcagcggcccgagcagcagtaaaaacaggcccagcgccggtcggcgccagaagatccccgatatgcgcccggtctgcgcaggagttattgccatggtcatctcagcctccgctttccagcggggtcatcgccgagcgcgaccatgacgcctgtactatttgcccggttcgcggaacgctggccgccgccgcgccatcgatgttggcctggctgaccagcagtttgtcgccatccgcgaggcggagctcgatccgcgtcgccgccccctgatactgcaccgcctgcaccacgccctgcacctgcacctcgccgccgccctgcaggcgaacatgctccggacgcagcgaccagctgcccgccatcccgcacaatcgtcgggccgcctcggctgcaaaaacgttggcggtgccgacaaaaccggccacaaacgcggtcctggggtgcagatagagatcctgcggggcatccacctgctcaatgcgcccgttgttaaacaccgccacgcgatccgacatcgacagcgcttcgctctggtcgtgggtcacgaagatgaaggtgatccccagcgactgctgcagctttttcagctccacctgcatctgctcgcgtagtttcaaatccagggcgcccagcggctcatcgagcagcagcacccgcggctggttcaccagcgcccgggcaatcgcgacccgctgccgctggccgccggagagctgggagggcttgcgatgatgagcaaagccaagggccaccttctccagcgcctcctgggcgcgggcatggcgcgctttcttcgccatgcctttgaccatcaggccgtaggcgacgttgtcaaggatcgacatgtggggaaatagcgcgtagtcctggaacacggtattcacatcccgctgccagggcggcagttcgctggccggttgaccaaagatatggatggttccgccggagagctgctcaaaaccggcaatcagccgcaggcaggtggttttacccgagccggacggacccagcatcgagaaaaattctccatcgcgtatgccaatgctaaccccatccaccgcccgcacatcgccatacaggcgcgatacattctgaaactcgaccgcgtacgtcattgtttgcctccgatccttagcggccgcccattatcgcaatatagtcctgagtccagcggctatagggcacgtatttcccgccttccgcaaccggcgttttccagaagtgaatgcggttaaactgctcatacccgttggtctcacagcctttatcaccgagcagcgcgctggctttacagccctcaggcaccaccggcagcgaaccgaaccaggccgccacatcgccctgcaccttcggcgtgagcgaccagttcatccatttataggcgcagaccgggtgcttcgcctcgctgtgcagcatggtggtatccgcccagccggttaccccctccttcgggaacacggtggcgaccggctggccttccgccttcaggccgttggcttgatagggccacgaactggaggcggctaccccttcgtttttgaagtcgttcatctgtacggtggcgtcatgccagtagcgatggatcagcggttgctggtcgcgcaggactttcagcaccgcgttgtactgggtttcggtcagttgataggggtcttcgatccccagctgcggctgggtggctttgacaaacagcgcggcgtcggcgatatagatcgggccatcataggcctgcacccgcccctggttggttttaccatccggtagatcctgcttgacgaacaccacgcgccagctgtccggcggcgtcgggaatacgcgggtgttgtacatcagcaggttcggcccccactgatacggcgtgccatagactttaccgccgacgttaaaccacgcccccttcgcaatacgcggatcaagggagccccagccggcaatcagcgccgtgttgatcggctgcacgcgtttgcccatgatcaggcgcagcgaagcatcacccgaggcggtgaccagatcgtagccgcctttggccatcagactgaccatctcgtcagaggtggcagcggttttgacattaacctggcaaccggtgtccttttcgaactgactcacccagtcgtactgtttgtcggtctgaccgcgttcgatatatcccggccaggcaataatatcgagccgcccttccggtttatccagcgaggtgagcggctctgccgcctgaacggtcaaacaagccatacccagcacataaaggctgcaacgggcaatttttttgctcatcaggtgttactcctgtcacaaaggaattagcggcagccgtgccgtaaaaatatctcctgaaataagggtagtcagcggattaacgcccccaggggaatttattcaggttgtgacccgggacgcattacgtaaaaatcgccaacacaagcaggactttatggattatagacaacgagttagggaatgaggaggggtatgcatatttcctatggtgagcgccggtaaaataatgaccggcctcgataaaaatcctctttcgcttattttcgcagaatgtttatgatgagaaaaataaacgacagggtcaggcaagctgttcgcgaataagctcccccaggcgcttcaccccctgctcttcgcgttccccccagccccaggcggtattaaaacggaaaaacgaggtccagctgtcggaggtggagaacattttccctggggcaatgctgatgtgcgacgccagcgcccgggcgctaagtgcgctagcgtcggccccttccggtagttcgatccacagaaagtagccgctgtcgctgtggtggacgatgacctccggcggcagatggcgcagcagcgcctgccaggcctgctgtttacgctccgccagctgacgacgtagacggcgcaggtgggcgtcatagcgcttggtggacaggtaatccaccagggctaactgcatcggcgaactggtggaaagcgtactcatcagctggagctgctggatccgccgcgcctgtttgccggccgccacccagccgatacgaaagccgggtaccagacattttgagaacgagctgcagtgcagcgtcatctcctggcgatcccagaacttcgccggtaacggcttttcgcggccaaaatagagctcgctgtagacatcatcttcgatcaacatcacgttatagcgcgccagcagcgccaccagcgccgcttttttttcagcgctgagggtgaagccgagcggattctggccgttggtcatcagccagcaggccttcaccggatagttttgcagggccgcctccagcgccgtcagatcaatgccttccctgacgtcagtggccaccgacaatgctttcaaacgcagcctctccagcgcctgcagggcgccgtagaagcaggggttttccaccaccacccagtctcccggctcggtcaccgcctgcaggctgaggttaagcgcctccagcgccccggcggtgatgacgatctcgtccggcgagacgttcatcccctgcagggcatagcgacgggcaatggcatgccgaagttctgcattacccggcggcagattctcaatgacgctcatggcggtggcggttttactcacctgcgccagcgagcggttgagctgctgcagcgggaagagacgcgggtccggaaaggccgaggcaaagggcagcatcgacgcctggcggctggcctggagcacctcaaagatataggtattgatatcgacggcttcatcgcgagtgacctgggcaggcggcgccggctggcggagcttcaccggctggggggcaacataataacccgactgcggacgggcgacgatgcgcccctggctttccagcagctgataggcatggctgacggtcataaagctcatgccgctgctgatcacctgctcgcgcagcgacggcagccgatcgccaggcaaccagacgccaagggcgatctgctcggtcagttgctgcgccaactgttgatactttttcattgcggccgtccccgtacgataacgtcccattatcatatatcagttataaaaaaatcatagtttcctgtaactgttatatctgcagcggcggccgcgtcgccgtgatagcacgggatgggtttaaaatatcaccacccagaatagcgagattaaaacaaaccagaagataatcattacgccaagcgtaatgcacagactctgtaatcctttttcagacattggcattcccttttatttattcccgagctcatacagtacaaattagccgcggagccgacaatttattattatttaatttacgattaaccggctcagcgtttttacttattctcatgctaatgagtgacaataaatcagagtaaaaatccgtggcggatttcgtaagccaaaatatgagctacggcgggtggtaaggatatattatgccgaccaggtgactacgccataccggcggcagggccgcgtagccagccgttagcaataatatgacagacagcggaatagacgcctaatcaccttccgcagggattaatcaaggttgcgcaaggatattttctcgccctggcaacagctgaaaaatcataacagcggccaactgttatgataaaaaatggcgtgactgcctctgcccctcagtcgtcaccccacctaaaattgcgctgaatcaattttgttgtggagtcctgcatgttcggtcttgatgcattccatctggcgcgagttcaattcgcttttacggtctcatttcatattatcttccccgccattaccatcggactggccagctatctggcggtgctcgaaggcttatggctaaaaacaaaaaatcccgtctggcgctcgctgtaccatttctggtcgaagattttcgccgtcaacttcggtatgggggtcgtttccgggctggtgatggcctaccagttcggcaccaactggagcggtttctcacagtttgcaggcagcataaccggccctctgctgacctatgaagtcctgacggcattttttctggaagcgggcttcctcggggtgatgcttttcggctggaaccgcgtggggccggggctacactttttcgccacctgcatggtggcgctgggtactatcatctccaccttctggatcctcgcctctaacagctggatgcagaccccgcaggggtttgagatcgttgatggccaggtcgtgcccgtcgactggctggcggtgatctttaatccgtcgttcccctaccgattattgcatatgacagtagcggcgtttctcagtagcgcgctgtttgtcggcgcctcggcggcctggcatctgctacgcggcaatcagtcgccggcgatccgtaagatgttctcaatggcgctatggatgacgctgctggtcgcccccgtccaggcgctgatcggcgatatgcatggcctgaataccctgaagcaccagccggcgaaaatcgccgccattgaggggcactgggaaaatccgccgggtgagccaacgccgttgctgctgtttggctggcccgatatggaccagcagcgcacccgctacgggcttgagataccggccctgggcagtctgatcctcacccacagtcttgataaacaggtgccggcgttgaaagagttcgctcctgaggagcgcccgaattctactgtggtgttctggtcatttcgcctgatggccgggctgggcatgttgatgctgctgctgggcgtgctggccctgtggctgcgtcgcggcgaccggctataccactcgcggccgtttctgcgttttgccctgtggatggggccatccggcctgatcgctattctcgccggctgggtgaccaccgaggtgggccgccaaccctgggtggtgtatggcgttcagcgcaccgccgatgccgtttccgctcatggcgatctgcatatgtcggtcagtttattgacctttatcgtagtgtacagcgccgtcttcggcgtcggctacagctatatgctgcgcctgatccgcaaggggccgcaggagatgctcccggcgacaaccggtacgccagcccgcccgctgtccgccgccactgaaggttatctgcagaaggagtcccgctaatgggtatcgaattatcggtgatctggttcgtgattatcgtctttgccacgctgatgtacatcgtcatggatggctttgatctgggcatcggcctgctgttcagcacggtgcggggcggcggggatcgcgacgtaatggtcaacagcgtcgcgccggtatgggatggcaatgaaacctggctggtgctcggcggcgccggcctgtttggcgcctttcccctcgcctacgcggtgatcatcgacgccctgtcgatccccctgaccctgatgctgatcggcctgatttttcgcggcgtcgcctttgagtttcgcttccaggccacgccgtcgcaccggccattctgggatcgcgccttttttggcggctccctgctggcaaccttcagccagggcgtggtggtcggggcggtgatcaacggtttcaccgtcagcggtcgcgccttcagtggcggcatgtttgactggctgaccccgttcagcctgttctgcggactcggactgtgcgtggcctatgcgctgctcggcgccacctggctggtgatgaaaagtgaaggtgcgctgcagcagagaatgcgcagcgcatcgcggcagttgctgggtgccctgctggcggtgtttgccgtcatcagcctgtggactccgctggcgcacccggcgattgctgcccgctggttcagcctgccgaatctctatttcctgctgccggtaccgctgctggtgatcctcgttagcggctggctgtggcgcacgctgcatcagcgcgaccgccatgtttcgcccttcacgctgacgctgggcctggtctttctcggcttcagcggactggggatcagcatctggccgcatattatcccgccggccatcacgttgtggcaggctgccgctcccccgcaaagccagggctttatgctggtgggcgccctgctgattattccggtcattcttggctacacctgctggagctattacgtgttccgcggcaaagttcagcctggggagggatatcactgatgcatactgcctggcctaaacgtctgctgtggctgatcgcgctctggggaggtagcgtactgacgctggccgccataagcctgctgtttcgcctgctgatgaccgccgcagggctaaaagtctgagggtggatgcagagaggtccgaaaagggacttctccatcttatcttcacttttgcctgatgaaatacggcgatacatctgaagaaaggatattgctatgaagaagttagctatactctccgccgtaatgacgctgggaatgtcgtcatgggctttcgctgccgacaacccgccgccgccgccggaaaaaggcgcgcagcatcagggtaaaccgccggtgaaaaacggccaacacgatggcaagcaagcgcaatacaacagcaaacagccacaacgagacggcaaacagtcacaacgagacggcaaacagccgcagcacgacggtaaacagccgcagcacaacggcaagcagccgccaaaagggagcgagcacagcgggaaaccgctgccgccgaaagcgtaacactctggcctggccttccgcgtcaggccttttttcatccttcgtcagccatcgttgacaaactcttgccgttctttgagatgcccgaaaaaaagcctgcattgcgcctgacatagtatgtccacgccattgttccgtcgagaaaaggtatgttaaagagaagcataagcgccctgctgttgctgtgcgcattattttccgggcatctgttggcccatcgtcagggacacgagtactttccggtgcaaagtctcgaacagcagctgctgcacgaagcggatagcgatgagcttcgcagccagcacgaggaggccgccgcagacctgcgcgaacatcaccgctggcaggacgaccgtaaaccgcgggcatcctgccaatagcatcgactcgaatcaggcccctttgcgcttcggcagcgtcttcatcagatcgtccgggctgacggaggccacaatgctgcccgggtgcggcattttaaggatatggtttttgatcttgccgaccacgtgcatttcgcacggacggcagtcaaacttcagggtcaggacctcatcgccatggatcagctgcatcggcgtggccttccagctcttgatggagcctttcgcctgcttcgggcagaggttgaaggcgaaccgcagacaatgcttagtgatcatcaccggcacatcgcccttctcttcgtgcgcttcataggcggcgtcgatcagctgtacgccatagcgctggtagaacgcccgcgccttgtggttatagacgttggcgaggaaggagagatgggtctccgggtagaccggcggcggtacggagaccggcttgcgggtgccgcgctgccaggcgttgaggcgcgcttcatccagcatctccgcagtttcccgacgcagctggttgagcaggctgttgggcacaaacagcggcggcagactaacctgaacatcgcgcgcatagtagatggtttgccccagttttgtgacaccgtcacgcaggttggccagcgctttctccgcctggttagcttcggcgaactccccgtcaagggtgtgggtcacgctaacgccatcttcacaggtcatggtgagaaccagctgctcctgccagccgctcaacgtcacgtctaccgcgatgcggcgttcgctggaggtctttagcagcgcctgttgccagttatgatcgaggttgcggttgagcggctgatgggggcgcactttatgcagatccgctggcatctcgttcggccatacccgataacggttttcgccggttttttccacggtattagcacggaagcccaccacttcgcgcttaatcatcacgttgagaccatcgccgttggttaacggttcactgacttcaacgtcgaggtggtctttgcctaccttcagaacttcacccaccggcaggccgataaatttcggcgaatcaaaggcgccgatatcgcctttgcgggcattaacaaagtagtcagtgctgccccggtggaaggttttatccgtggacgggataaagaaatgctcggtgcgtccagccgaggcgcgcgccaggtcgccgcgatcttcgataatggcatccagcatttgacggtagtgcgcagtgatgtttttcacataactcatgtctttgtaacggccttcaattttgaaggagcgtacgccagcgtcgatcagcgccgccaggttggcggtctgatcgttatccttcatcgacaggagatgtttctcataggccaccacccgcccctgatcgtccttcagggtatacggcaagcggcaagcctgcgagcagtcgccgcggttggcgctgcgtccggtctgggcgtgcgaaatgtaacactgcccggaataggccacgcacagcgcgccatggataaagaattcgatagtggcgtcagtgtggtcgtaaatggctttgatttgactgaggttcagttcgcgcgccagcacgatctgactgaagccggcgtcggagagaaacttcgctttttccacactgcgaatatcgcactgggtgctggcgtgcagctcaatcggcggcagatccagctccatgatccccatatcctgcacgataagcgcatcgacgcctgcgtcgtagagatcggtaatcagccgctgcgccggctccagttcatcgtcatgcagaatggtgttcagcgtcacaaatacctttgcgccaaagcgatgagcgaaaggcaccagcccggcgatatcgctcagactgttgctggcgttgtggcgggcgccaaagccaggtccaccgatgtaaacggcatcggcgccgtgaaggatcgcttcgcgagcgataccggcgtcgcgggcaggactaagaagttcaagacgatgattgtgcaggcgcatacgcgtgttgttatccagtataagggggtcgaaatggcggctattgtagtcagaaccgggcgcagacgaaaaccttttccgccttcgcgcgacgacgaattttcacttttcaacaaagtattgacggaaaagatatttccctcaaatcacggcgaagagtactgtcatcacgtattccggattttcctcgtcacgttgtgagtggttatcatcagtcatcttgtctggccgcgggttcgctcgcggttttttcttttggataatggataagagaatggaaatgggccgcctgggcgccgcggttacgatacgcatgcgtcgcgtcgccggcgaaacgcctaccctcacccgcctgcagcgagtgccactccccttgtaagcacaaatccagcgtaccacttatcactaccacatgctcaatcacccctttctcatgcggcgttgattcgctcagcgcgccgggggcaagggttatcgaaaaatggtcaaagcgcagctcgggatcccacgggaatactggcgtcaccaccatcgcctgctgctgcggatcaaacgcggagggcgcggcgctggcgtccgggacgatgaacgccgaaaacggtacgttcagcccggtggcaatcttccacagcgtcgccaccgttggacttgattcattccgctcaatctgcccgagcatggctttcgacaccccggtctcttccgccagtcgcgacaggctccagcctcgctgctggcgcagggttttaagcgttgccgccagatgttgcgcaatattcatccttcctcctgtttttactgcgcaaagtataccgccatttgtctgattttttcaggacgtttaacggcatcgtacgccgctggcggcgagtttttctcccagggtagctgcgcgaaccaccacttgtgcgttataacgcacaatgatacagtgaatggatgttataacgcacatgagaatcatcgatgcgctcgtttagtcttccgcttcccactctgtttgctggcttcgtcgccgtgttggtggggtacgccagctcctccgccatcatctggcaggccgccgccgcggccggcgctacccccgggcagatcgccggctggatgacggctcttggcctcgccatgggcatcagcactctagcgctgagcgcctggcggaaagttcctgtgctcaccgcctggtcaacgccgggcgctgcgctgttagttagcggcctgcagggggtgaccctcgccgaggccgtggggatctttattttcgccaacgcgctgatcgttatctgcggcgccaccggcctgtttgcccggctgatgcagatcattccccattcgctggccgccgcgatgctggctgggatcctgctacggtttggtttgcaggccttcgccggcttacaggatcatctgccgctgtgcggcgggatgctcgccgcctggctgctgtgtaaagcgctgtggccccgcttcgccgtggtggccgcgctggtgattggagcgctgattgcggcggcgtccggggatgtggctagcgcccccgtgccgctggcatttgtgacgccggaatgggtcgccccgcagtttactccggcgcttttgctcagcgtcggtctgccgttcttcctcgtcaccatggcctcgcagaacgctccggggttcgccaccctgcaggcatcaggctataccgtaccggtctccgcactgatcgtcgtttgcggggggttggcactactgctggcgccgtttggggtttattccatctgcatcgcggcgatcaccgccgccatatgccagagcccggaggcgcacccggatccgaaccagcgctggctggcggccatagccgcgggcggtttttatctgctggccggtctgttcggcgggtcaatcaccgccctgatgtcggccctgccgccggcgtggatccagatgctggcgggtctggcgctgctcggcaccatcggcgggagtctgtttcaggcagtgcatcaggccagtgaacgcgatgcggcggtgttaaccttcctggtcaccgccagcggggtgacgctggcgggaattggctccgccttctggggcgtggtgctcggcggggtgagttacggcgtgctatccgcgttgcgccgcccgtagctgggagggcgtcaggccggtggcggctttgacccgatggctgaaatggctgggggagctaaaaccacaggccagcgctatctcggttaacggcagcgcgctatggcagatcaggttttgcgccttcgccattcgctgctgcatgacgtactgatgcggagccatatttagcgactgacgaaacatacgagcaaaatgaaactcactcagacccgcctgctgcgccaggtcggccagggtcaagggctgatcgagatgagcatcgatccaggccagtacgtgacgctttacgcctggcgccagcccgccggtgaccgtcggcaaacgccactgcacggtggaatagtgctggatcagatgggtaagcagcaagctgctggcggcgctgagggtcagctggttcgccggctgccgccagtcgttagccagcaaaaactgacgatataccgcggtgattttatcatcgctggcgaaggtcttttcctgcagggtgaagttcgccgggctgcggtcccacacctcctcgccgacgcgacgcaggtgcgcatcggtacagtaaagatgcacaaacgacagatcgccgcggatatcccatacgctttcatcgcctttcggcatcagacaaaaacggtccgggccgccgccatttttccagccgtgcggcgtcttttgatagctttcgtagccatcagccacgtacagacttaaggtatgatggtcgctgcgcaccgtcacggtatcgcaattgttataccaggcggccagttgaataccggaattcagctccacggttcccttcagcaccgcgttctgtcgccgtaatgtttcaaatgtcccgtaacccatcgtcttcacacattgtctgtaaaagccctagtctagggagactccggcgcggtttccagtcctcaccgccagcggatggcaaataagcgcaagaatttgcaagccgacaacaaaccggtgaaagccgcagcaggcggcagccggcatactcctcccattaacaggtagaggagaaccagggtgaacgcattactctatgcactcgttgtcgtgatctggggtacaacgtggatcgcgatttttttacaacagggaccggtggccgcgccggtatcgattttctggcgtttcgccgtagccagcgtcacgatgctggcgattctgctcgtcacacgacgcctgcggccgctgggcgcgaaagatcatctctgctgcctgctgcagggctgctgcgtcttctgctttaatttctggtgtttttataccgccgccgcctggatcaataccggtctggaatcggtgatcttttcgatggcggtactgtttaacgccatcaacagctttctctttttccgccagcagccgccgggccgcttctgggccgccgccgcgctgggtctcgccggtatcgtcatcctgttctgggacgacctgctggccaacggactgaacgcctcgctgctgtgggggatcgggctgagcgccctgggtacctacggtttttcgctcggcaatatgttcagtattcgccaccagcgccgcgggctggaaacgctgaccaccaacagctgggcgatgctctacggcacgctggtgatgggggcgatcgctctgctgcgcggcgataattttatgccagaatggaccgtcagctatctgggcgccctgctttacctggcgctgttcggctcggtcatcgcctttggcgcctatttcactctcgtggggcgcatcggcgccagcaaagccgcctacagtacgctgctgtttccgctggtcgccttatccatttccaccgtctatgaagggtatgtctggcacagcagcgccgtgatcgggctggcgctaatcctgctgggtaacatggtgatgtttgccaaaccggaacagctattgctgcgccgaaggctggcctgaggaggctgaagaaaaacagcgccgtcgtcagacggcgctggcacgattaacgctgagagggatcgaatttaacggcgtcgaccgccatatcatcgataacctgcttcagggtatcgacggtcagcggtgtattctcattcgccagggttttgccttcccctttacgtacgaccttgatgaccggcttattggtgctggcgtcaatgacctccgcctcaaagtacagatcggtgtccatggtacgatggccggtggcggcctgggtgccggcgacaatcatagcaaccgggatcacttcatagaactgcagcccctctttgctggagtccaccccggtgatcgccccgcggaagatgaggctgcgcttgccggcggtagtggccagcggtttacgctcggaaatagcctgtttcagctctttgttggtgtagttaagaatatcctgcagcgccttctcccctacctgggtggtcggcttcggtaccggatagtaggtcaccgggtgataaacaatattgtcatagttggccggattgaagttcggatcgatccagcgcagctccggcttgccggaggcagaggtcgtttctttcaaactggaataatcttttaagaagcccgaatactgatccggttgcgccactttcgccgcacagccggtcaacgccaatattcccgccagagcggcgactttcagtaaaacgcgagtacgcatagagagatccctgtaaatgcagtttttttcggcagacgttatagcaaataggacccactagttttgtgacaaaaaaagggcttcgtcaaggaagatttataaatattgattgcctgaacattacgttaataaataatcacttaaaaggggtatcgcgcggttttccaggctcattttcgccgcaacgggtctctgtcttgcccaggctctggcggggaatgcggcgcgggccatgctcagcttcccacgccgcggcgaatcaggcaggcttgcgcgccaacagggtggcgaagcgcaatttgatgcgattgccgttggcgtcggtgcgatgcagctcgccgacgtcctcattgtatttcagcagctcccagccctggtaataatcacgaagctcatcaggtttaaaggcaaacgggaagccgacggtgcagggatagtcttcggtatccatcgccgccacaatcaggttatagccgccggcggcggtgcagcgctgcatattggcgatcaggcccgggatggtgtcaggctcgaggaacatcatcactacggtggagaggatcaggtcatactcgccgtcaaagctcaggctgttgaggtctttcaccgccgtttgcagattatccagtcgctcggcagcgcgaatactttccagattgttgacgctcatcggatttttatcccacgccgtcaccgcgaagccgttcgccgccagataaaggctgttacgcccgttgccgcagcccagatccagcgcccgccccggcggcacaatcgtcgcggcatgcagcacctcggaatgggtgcgggtcaggctgtatttttgactaaaataatccgcgtcacgcattgtcatgatccttccttcttattcaggagtgtttcccggtcgacctggagcaacagttttccgctgaccaacagcaacgctgtacgcagcagcagcaggccgacaaccagattgctaaaaataaatagcggcatcgccagatgatgaaaaaagccgtctcccctggcctggccgagatgcagaccggtggtggccagcgcggaaatgccgaacgagaagctccagaaagaagcattgaacggctgacgaagataccagggcatcagacggagcataaacagtagctgcagcaggccgtaaccaaacagcagcttagcgaaggtatcggcctccccgccgttgacgctgagccaggcgctgcaggccaccagcgcaggcgccagctggatccccagcgaggtgcgcagcggcgtcggcagctcgcctgcgctgcgcagacgctggaggatcgccggctcgaggctcagccaggagaagaccccggcgccgaggaacaccagtccggcatcggaaaatcccagcgcgccgcaggccatcgcgctgataaaattattggctactgtcggcagatacaaccccggcgtggtggcctcgcgaggatggttcccccgccatagcccaccgctttgccaggcggcataggcgagctgcagcgccacgcccggcacaaacagcccgatcgccagcggccagcaccagggagccaaaccaatcgccaccaacagcgtggtggccggaaacaggctgacgaagctgctgctcaccggatgacgcatctcccgcagcacgctcgccggaaagcggatcgcccggctgataaacgccatgctgagcaggacccacatcgccatcgccagcgtcaccagcccatcaccaatgctgcggctgaccggccagagggtgctggcgtaacgccaggcgaagcccattccgatggtgccgagcaccatgccaaaataacccgccggcaggtttagcacctgccgcggcgtttgcgttttattcattttattgatgatatcaatttaatttgaagttgcattctaaaggaaccttatcccgcgcgctatggcgatctttgctatgtttatgttaaccataagtaataaggatcggccatgcgtaaataccgtctcagcgaacagacccggcagtattgttatgaggaagagcatggcaaacaaagcgtcaccctgcgccagatcgtggcgcttattgatttcgctgacgttaaagcgggcagcgaaggcggctgggtggatgaggaatgcgctctcagccagcagggggagtgctggatctacgatgtcaacagcgtggtcttcgccggggcgcgcatccgtgacgacgcccgcttaaccgggttctgcgtggtcagccatgaggccaccatcggcggacaggcctgcattcacgcctcgcagatcagccatcacgcgcagatcagtgacaacgtcacggttacgcagagccaggtgcgcggttattgtcgccttgccgacgaggcgcgtcttctcccccactgccaggtgattgccgcgcgcgggttaaccgccgatcgcgacaaagtcctgcagatctatcagcgagccaccgtcagcgcctcgcgcattctccaccaggcgcaaatctacggcgatgccttcgttgagcatgcgtttgtcgaacatcgggcggaagtgtttgaccaggcaagacttgaagggaacgaagaaaacgacgtctgggtatgcgataacgcccgggtatacgggcacgcgcgtctgatcgccggtcgtggagaggatgccattcccaccgtgcgctacagttcgcaggtggcagagaatgcggtgattgaaggcaactgcctgctgaagcatcgggcgatggtcggcggcgaggcgcagctgcgaggtggtccgattctgctcgacgacgatgtgctgatccaggggcggacagtcatcatcggcgatgtgatcgttgagcaccaggtctccatcaatgacgaggtgcagattgccgcacaggagggagaggccattcatctgcgcggcccgaaaacgcttgacggccagcagcacatcacccgcacgccgctgttaggcgcgctttaatgcctcatcgcggtcaataatgcgggcgtagatattctgatcgtcatagctaccgttcagatactcggcttgtcggagacagccttccagaacaaacccgttgcgcaacgctacctggttgctgcgggtgttcgccacccggcatttgatcacaaaccggcgcaccagcccgctggcggcataatggcggataaaggcctgtaatgaacgggaaagcagcccttgcccctggtgctcttcatcgatccagtagccaatataggccgttttattctgcggctcgatctgattgaacgacaggacgccgactagctgcttatcgagaaacagcaaaaacattttggcgtaatcccgctgatgcagcatcacgttgccctgcacatggcggcgggtctcgtcttcgctgcgcacctcggcgggccaactgagcgactgctgtagccagcgctggtttttgaccaccagctggtgcaggtcgctaacgtagcgctcatcaatggcgattagcgtcagcgcgtcggttaccgggatcgactcaggtactgctgggatatctgcggtcatagcgctctcttctggcccgcagggactgcctgcgggcgtcgggtgactcagggttatttcatgatccggtcgtcaacgtagttgcgtttatctgctgccggcgggaaatactgatagagccaggtttcgctgatggcttctccctgacagcgcaggaacagacgcatctccaccgggtcggttgagtcggtggtcggataccagtcgaaaaggatccggtagccatcgaacggctcgacgtagaggatctcaatctgcttcgcttccccgctggagagggtgatcaccggttcaataccgcgcggcgcggccgccttcaaatcgccgccgacaaagtcgatggcaaaacgacgcgcccacttatccgggtagtgttcacccggcgcccatccctcggggaagcccccatcccggtgcgggtggccagaacgcgcgccagcggagtgctcaccggcggctgcgcgctccagtaaagacggtagcggaagtccagttcgtcgcccgccttcaccgccttttccggctgccagaagcagacgatattatccagcgtttcgccggtagttgggatctccatcaggctgaccgcccctttgccccactggttacgcggctcaacccacaggctgggacgcttgttataccagcccatcacatcctggtagtgggagaaatcacggtccagctgcaacagaccaaagccgcgcgggttcttgtcctggaaggcattgaactgcagcttctgcgggttattcagcggccggcagacccattccccgttgcccaaccacattgacagccgatcggagtcgtggatttgcggatggatggtgtcgcacatccgccgctcattattgccgcagctgaacatactggtcatcggcgcgatacccagctgtttgatatccttgcgggcgtacaggtggttttccacgtccatgataacctgggtatcctggcagtggatggtgaacttgtaggcgccagtgatgctcgggctgtccagcagcgcgtaaacggtaaacaccgtggcgtcccctttgaccgtttcgaaccagaacgacgtaaagtcgggaaactcttccggggtatcggtaaaggtatccaccgccagaccgcgggccgacaggccatactgataggtgctgtctaccgcgcggaagtagctggcgccgaggaacgccacgatatcgcggcgcgccagctccggcgctttaaacacccggaacccggcgaagccgaggtcagactgtccttccagctgacgggtatccacaccggcgtcattgtacttaaacagctccggacggaagtggatctcgcgcgcctgctgggtgctggcgtctaaagagaacatccgcacgcggcgacggaaccccatcccgacgtggaaaaactggatgtccagcttacgctcttcaatattgttccacagcgagtggttggcatcgtactggatgctgttataggcctgcggggtgagattggcgagcgtcggcggcagatcgcgcggggcgccgccccacggctggcgcgccagatcgtgagccatcgcctgcagaacagcataatcaaaacgacgcgtttgcccgtcggcaatgcccgcgtcttcggcaaaagcggcctgactgaataaggaagcgactcctgacgttccgcatacggcggcaacagccatggaagatttaagaaaacgtctgcggttcatgcctgagaaagcgtccttctgcacgggtgaattgattcgcaacgcgtcatcacgctgcgtgataatttccgcccactctagacaaaaacgattaataatccaattgttgccagcagaaaaaaggtaaaaaagccctgtccagaggaacagactgtttttttcatttcctctgacgtgtagcctgggcatacacgctgcctgccgctttttacccctgactattcaagggaaatctattctccagtgctgaatattcaccccatgtatcgctcctcgccgcgcgcgttttttaggcacgattcgcgcaaattcccatcgcgcctggtgctaacttttccccgataaccgctatctttcttcacgttagcggccaacaggggagagccgttcgggctgtcccgccacgctctccagggaattcattcaggagtcatgccatgcaagtgaaagcagccgttacgctgggctaccagcagccttttgtcatcaaagacgtcgaggtcgccccgccggggaaggacgagatattagtgaaaattgtcgccaccggcgtctgccataccgacgccgtgatgcgcgacaaccccggggtggtgcctatgccggcgatcctcggccatgaaggcgccgggatcgttgccagcgtcggcgaggcggttagcggcatcagagtaggagaccacgtagtgctcagctacgccgcctgccaccactgcgaaaattgtttaagcaaccacccttcggcttgcgaagattttaatacgcttaattttggcggccgacgcgaggatggcaccaccccctaccggctgggagaccaggatctgtccctgttctttggccagtcgtctttcagccagtatgtggtcacccgcgccagcaacgcggtcgtggtcgacccggaggttgatctcaccctgctcggcccgctgggctgcggtatccagaccggtagcgggacggtgctcaaccgcctgaaaccggtggtcggcgaatcgctggtggtgtttggctgcggcgcggtggggctcagcgccatcatggcagcgaaattaaccggctgttcgcagattatcgcggtggatatccatgccagccgcctcgccctggcgcgcgaactgggcgccacccatcagatcaatggcaaggaacaggatgccgtcgccgtgattaaacaaatcaccggtaaaggcgcccactacgcggtggaaacgaccggcgtctccgctatcgttctgcaggccgtacacgcggtgaaaccgctgggaacggtggcgattgtgggctttaccggagatatcacccttaacgtgcagaacgacctgatggcggagggaaaatcgctggtcggggtgattgaaggcgacgccgtgccggcgctgtttattccgctgttggtgcaactctataaacagggaaaattccctatcgataagcttatcgcccgctatccgttggccgatatcaaccaggccttcgccgattcggcgtccggcaaggtgatcaagccggtggtggtcgtgtgagataacgtcgccaccggtcggtggcgacagttgcgcattatgggatttattccagcgtcacgtgatgcttcatcacccggcgaaacagcgccagtctggcgcgcataaagcggttctccactttaaacccggcgcgcttatgcaagccaatgcgcaacaggcgatcccgcccgcgcaggcacgccggccagcgcaccgcgccggaaagcgtctgctcgccgctggcgaggcgggcaaactgcgcccagtagtcagcgacctgagcggcgaaggccagatccgcttcgctggcgtactgccgcaccgggtcggtcaaccgcaggttatcaaacacgtagggcacctcgttgccatgccaggccccatgcgggtaggcgtcatgctccgcttccgcgacataatcaaaccagtagcgccagcacggctgacccacgcgctgttgcgcctgcatcactacataaccaagggtggtgaaggccatgtcgcggcatacttcccgccccagcgcttcatcgcccttcacgccgggatagaggagtttgatcagccccagccccagacggcgctctcggcgcagcttctggatctgcccggcaatatcgacgccgaacacggccatcacgctggcttcatcgctattggagccgatcatcaccggtatcggatgctggcggccggcaaagaaggtctccagcatcggctgcggcagcaccgcgtctccggcaataggcgctggcccggtattcagcggcgcggtgagcgaccagaaggcctccgccgggatcgcccgcaattcctcagcgctggcttgcggtaaggcgaagtgttccgccagcaggcgccctttttccagcgctttttcccgcggcagatcgggtagcgtatacccgctctgaataatcgctttatgaaacagccctttcgctttcggggaggccattagcgacagcacgctgcgcgccccggcggattcgccaaacagcgtgacgttggcggcatccccgccgaaggcgtggatattctcctgaacccactgcagagcggcaatctgatcgagcaacgcgaaattatagagacgttcgcccgcctcttgttccagcgccggatgggcgaaaaaaccgagatggcccagccggtagttaactgtcaccaccaccacgtcgcggctggcaagcgctttgccatcgtaaggcggcaggctgccggcgccgatggtaaacccgccgccgtgcagccagaccatcaccggcagcggctgcgctgcgctggccggggcccagacgttgagatataagcagtcttcgctgaaggcgccaggatcgccgccgccgagctcgcggcagtagtcaatgtcctgccagctggcggcggaaaaggtctcagctggacgtaccccctgccagcgggcggctggctgcggcgcgcgccagcgcagcgggcccacgggcggcgcggcgtacggaatgccgcgccagatatgaatcccctgttctgcgctcccggcaagcgttccctgacgggttttcgccaacggtttcgacggatgttgcataacctgctccctgtaaggctgatgccagcagggtactgattttacagcagaccgcaacgtcgtttgctgcgctcctccgcctgtcggtatagttcaaactcatcctgcaccgggcagcccagagctgcctcaaacgcctcgcgactggcgttcccgtggctgcgcgcctgggtttcgttgcccagattggactgaaaaatgcccgccgcgctgaccggtaaaaaatcttcataaataatcggctgggcgaccacccacccgcgctcaatcagcggctgcggatcgtcgcccgggcgaaacgcctggcgatgtgcctcacccgtgggcgtcaggcggtagcgaaaccaggccagcccctgctgacggagcagaaattcgctgtcgggaaattcgctaaacacctcctgtagatgctgctggtggctgagattatctttcccggttcctgccgcctgcagcagccgatcgtacagcgcgcgccctttcggcgtcagcgccacgccccgctgctcaatttcgccaaagcgggcgctatgggtgcctcggtgttctccggcgaacatcaccggctcctcaagcgccttaaagctggtctgccgcaggaggatcgggacctcccggcgcggtggcccttcaatcaacgctttgggttcaataccgcactccggcatcagggactggacgcggtcaatatccagcgtccgcggcgtgagatggttgatatgacaccccgggaaacagaccacatcggcaatcaggcggtgctcgcgatgcagagcatggtaagtctcctcatcgacggtggcttgccggtgccagcggaacgtctccagcgcctcctggacaaactcgcgcgcgtcggcagaggtgaattcgccctctgcttcatactgcgcaatcagcgccaggcagcggggggtgaagattttgcgccgcgcgaggatcgcctcggcccgctcgcgcagggcgcgattttcaatcagctccaggcgcagcagcgaggtgaaaatccgaaatggattgcgcgccagcgcggcatcgtcgatgggacgaaacgccgtggagtggaccggcacgccggcctgcgagagatcgtaatagctaacgggatacatccccatgatggcaaacatgcgacggagcgtcgccagttcttccgctgtgcccacgcgaatcgcgccgtggcgctccacgtttaagcgcgccagctcgtcagcgttagcgagctgttcatgcagctgcggattattttccagtaccgccaggttgacgtcagccaccagctccagcagcgttccgtactgcggaacttcctgctggtacatggccgacatggcctgcgaaaagtgctcccgaatctcatcagccgtgatggtgttcgccatgatgtgttacctccagtgaatacttcctggagtgtaggaaagctgcctcgcggcggggggaagaatttacaaactgtgatggcgataacctgccgccggtccaggtcattgcgcaaaacataacccatagttatgaaaaacaccctgtaatttcactttaaattaacaatacatttacacacactgcttctggcgacattacaacaatatgcccctctaccgtctacacggagtaccctatgaacgacaaatggtccccacgtgaggttgtccatcgcgattacagtagccacccgcccgcttacgcgccgggctataaaaccagcgtcctgcgctcgccaaaaaacgccctcatctctctgcagaactcgctgtcagagatcaccggcccggtatttagccgcgacgacctgggccctctggataatgacctaatcctgaactatgccaaagaaggcctgcctatcggcgagcggatcatcgtccacggttacgtgcgcgatggattcggccgaccgatgaaaaatacgctggtggaagtctggcaagccaatgctggcggtcgctaccggcataaaaaagatcagtatctggcgccgattgacccgaattttggcggttgcggccgggtgcttaccgatgaaaacggctattactgttttcgcaccatcaaacccggcccctacccctggcgcaaccaggccagcgactggcgtccggcgcatatccatttttctctctcgggcgacgcctgggcccagcgcctgatcacccagatgtattttgaaggcgacccgttgattaagcagtgcccgatcgtcaggactattaataatgacgacgccgtgcgcacgctgatcgccgagctggacatgcacgccgccgtaccgctggattgtctggcctaccgcttcgaccttgttctgcgcggccaccgcgccacgctgtttgaaaatcgcactcagggggccgcccgatgaaagagtatctgcctgaaaccgcctcgcagacggcgggaccctatgttcatatcggcctggcgccggacgccgcaggctttcatatttttgagaaaaattttggcccggtcctcactaccgccgataccgccggggagcgcatcaccattgaaggccgggttatcgacggctccgggacgccggtccgcgatgtgctgctggagatctggcaggccaacgccgcgggtcgctataaccatcctgacgatcgtcaacagcagaaagccgtcgacccggccttccgcggctgggggcgtacctgctctgatttcacctccggcatttggcgctttgaaaccatcaagccgggcccggtggtcggtcgggatggccggctgatggcgccgcacgtcaacctgtgggtggtggcgcgggggatcaatattggccttaatacgcggatgtactttgccgatgaacacgaggccaacgccagcgacccggtgctgaatctcatcgagtgggaggtgagacgcaaaaccttaatcgccgagcgcgaggttcgcggtacggaagtggtctatcgttttgacattcatctgcagggcgagaacgaaaccgtctttttcgatatttagccgtcgcggtgaccaccaccttcgccccgtttctgcggggcgaaggcgttttcaaccacagggaaagatcttgtcatgtaaccaacccaaatgttaataatattttgctatctggttatcaaatttaaacaagtccgcttgtctctttcaccgctgtgtttttaacatcatcttactatggaaaaaaatggtctcttcagtcagcgcattcgcttgcgccatctacacaccttcgtggccgtcgctcaacagggaacgctggggcgcgcggctgaaacattaaatctgagccagccagcactctcgaaaacgcttaacgagctagaacagctgaccggtacccggctgttcgagcggggtcgtcttggggcgcagctaaccctggtcggcgaacagtttctgacgcatgccgttaaggtgcttgacgcccttaattcggccggccaggcgctgaaccgcaaagagggcctgaataacgatatcgtgcgcatcggcgcgctgcccaccgccgcgctggggatcctgccgacggtgatcggccagtttcacaagcagcaaaaagatatcacgctgcaggtcgccactatgaacaacaccatgctgctcgccggcttaaaatccggggagatcgacatcggcattggacgtatgtccgacccggagctgatgagcgggctgcattacgaactgttgttccttgaatccctgaagctggtggttcgcccgggacatcccctgcttcaggagacggtgacccttagtcgggtgatggagtggccggtggtggtctcacctaaaggcaccgtgccgcggcaaaacgccgaagcgctgctccagagccagggctgtaagatgcccgccggctgcatcgagaccctctccgcctccctgtcgcgccagctgacggtggattttgactatgtctggtttgtcccttccggggcggtaaaagacgatcttcgccgtggcgtgctaaccgccctgccgatcgccacccagggcgccggagagcccatcggcattttaacccgcgtcgatgcgacactgaccccgggtacgcagacgctgctcagcgctatccgtaagtccatgcctgcctgacccccctttctccccggcccgcagcggccggggaacctgcaaacgcgccgacgccgctccccatgacgttagacatattcggcaaaataatcatttagtgcgaaattatttattaacatttgcgcaaacttctttaacagatctatcatgtctcgatttcaccaaatggttcactcgaaatctaatcaagcaacaaatacagttttatgaaggttaaaaccacttcattcaaaaatgattcaaaagcaacatgtttcatttggttcacagtgaggtggctggtgtggttaaggagattacatggcaactggcaacgcgccgcgcggattcccccggatcctgcagtggcttctcgccggactgatgctcatcatcggtctggctgtgggtattcttggggcaaaactggccctcgtcggcggtacactgtacttcgcgctgatgggcgtggtcatggtcatcgcggcggtgttgattttccgcaaccgccgcggcggtattctgttatacgccgtggcgtttatcgcctcggtgatctgggcgattagtgacgctggctggaactactggccgctcttctcgcgcctgtttgcgctcggcgtactggccttcctggccgccctggtctggcctttcctcgccagcccaccggcgaaaaaaggcccggcctatggcgtcgccgccgttctcgccgtggcgctggcggtgagctttggctggatgttcaaatccgcaccgctggtcagcgcgactgaagcggtaccagtcaagcccgtcgcgccaggcgaacagcagaaaaactgggcgcactggggtaacaccacccacggcgaccgtttcgccgccctcgaccaaatcaacaaacaaaacgtcaaccagctgcaggttgcctgggtagcgcatactggcgatatcccgcagagcaacggctccggcgcggaagatcagaacaccccgctgcagattggcgatactctctatgtctgtaccccttacagtaaagtgctggcgctggatgtggacagcggaaaagagaaatggcgctatgactccaaatcctcttcacccaactggcagcgctgccgcggcttagggtattacgcagatagccaggcgcaaaccgcgcaagcgtcaggcacgcagccggccgcctgttcccgtcgtctgttcctgccgaccatcgacgcccgcctgatcgccattgatgccgataccggcaaactgtgcgaaagcttcggcgatcgcggtattgtcgacctcagcgtcggcatgggtgaagtgaaagcgggttactatcagcagacctccaccccgctggtggcgggcaatgtggtggtggtgggcggccgcgtcgcggataactactccaccggcgaaccgccgggcgtggtccgcgcgtttgatgtccacaccggcaaactggcgtgggcgtgggatccgggcaatccagcgctgaccggtgttccgccggaaggccagacctacacgcgcggtacgccaaacgtctggtcggcgatgtcctatgacgcgaagctgaatctgatctatctgcccaccggcaacgccacgccagatttctttggcggcgaacgtaccgcgctggacgataaatacagctcctctatcgtggccgtggatgccaccaccggccaggtgcgctggcacttccagaccacacaccacgatctgtgggactttgacctgccgtctcagccgctgctgtacgatctgcctgacggcaagggcggcaccaccccggtgctggtgcagaccagcaagcagggcatgatctttatgctcaaccgcgagaccggcgagccggtggccaaagtggaagagcgtccggtgccggcgggcaacgtcaaaggtgaacgctactcgccgacgcaaccttactcggtagggatgccgatgatcggcaaccagacgttgaccgagtccgatatgtggggagcgacaccgatcgacctgctgctgtgccgtattcagttcaaagagatgcgccatcagggcgtctttaccccgccaggtgaagatcgttccctgcagttcccgggctcgctcggcggcatgaactggggcagtgtttcgctggatccaaacaacagcctgatgtttgtcaacgatatgcgtctgggcctggccaactatatggtgccgcgcgcgaaggtggcgaaagacgccagcgggatcgagatgggcatcgtgccgatggagggcacgccgtttggcgcgatgcgcgaacgtttcctgtcgccgctgggcattccgtgccagaagccgccgttcggcaccatgtccgcggtagatctgaaaaccgggaaactggtgtggcaggtgccagttggcaccgtagaagacaccgggccgctgggcatacgtatgcacatgccaattccaatcggcatgccgacccttggcgcatcgctggcaacgcagtccggactgctgttcttcgccggcacccaggatttctacctgcgcgcctttgataccgcgaacggcaaagagatctggaaatcgcgtctgccggtcggcagccagtccggcccgatgacctacgtctcaccgaaaaccggtaagcagtacatcattatcaatgccggcggcgcccgccagtcaccggatcgcggcgattacatcatcgcctacgcgctcccagaccatcactgatcgacatacacaaaagggcccatccgggcccttttttatgggtgacgattcgccttcagcgtcggcgattactggtcgccaaagtggatcacggtgcgaatcgatttaccttcatgcatcagatcaaaggcctcgttaatctgctccagcggcaggcgatgggtaataaacggatcgaggcgaattttacccgccatggcgtcttccaccatgcccggcagctgactgcgcccttttacgccgccgaaggcggaaccgcgccacacgcggccggtcaccagctggaacggacgggtcttgatctcctgcccggcgccggctacaccgatgatcacgctctcaccccagcctttatggcagcactccagcgccgcgcgcatcacatttacattgccgatgcactcgaagctgaaatccaccccgccgtcggtcagctcaacaatcacatcctgaatcggcttatcgtagtcgttcggattgataaaatcggtcgcgcccatctctttagcgagagtgaatttatccgggttggtatcaaccgccagaatgcgcccggcctgcgcctgcaccgcgccctggatcaccgccagaccaatgccgcccagaccaaagaccgcgacgctatccccggccttgaccttcgccgtgttatgcaccgcgccgataccggtggttacgccgcagcccagcaggcacactttatccaaaggcgcctgcggattgactttcgccagcgaaatctcggcgcaaaccgtatattcgctgaaagtgctggtgcccatatagtgatagatcggttcgccattgtacgagaaacgagtggtgccgtccggcatcagtcctttaccctgggtggcacgcaccgcctgacagaggttggttttacccgacttacagaatttgcactcgccacattcggcggtatacagcggaatgacgtgatcgcccggcttaaggctggtgacgccctcgcctacttccacgacaatcccgccgccctcatggcccagcaccgccgggaagacaccttccggatcgtcaccggagagggtgaaggcatcggtatgacacaccccggtgtgggtgattttcaccagaacttcgccttttttcggcggcgcgacgtcgatctcaacgatttttaacggctgaccggggccgaaggccactgctgcgcgtgatttcataactgtctcttcctcgtcgtgatgttattttaaataggatcgtagcagatgaccgacctctgccattctcgcggcccgctgctcaggggtggtgtcgccgctgaccagctcgtcctgcaggtggatctccaccatttcgcccatcaggccgttcgccgccccgcgaatcgaggcgatctgctgcagaatagtcatacagggctcgccggactccagcgcgcgctcaagggcttcgacctggccgcggatgcgtcttacgcggctgagcgcccgttttttatcttcaggtgaatgtggcacgattacgcctccgtatcatataggggggtatactatattctattaacggtgaaggcaaaaaaaaaccccgtcgcgggacggggtcaggaagtgaaagaggatgatttagcgcttacgaggcatcattcgcagcagagtattatccttccaccagtaatgatggagcagcgcggcgagagcatgcaggccaatcacaaagtacccggcattggccaaccattcatggatcgccttcagggtatccacccgctcaaaatcgctctgcggggcatacggcatggtcagaccaaaggcataccaggggttaccgcgccagtacatcatcaccatgccgatcaacggcaaggcaatgaacagcaaatagatcgccaggtgaccaagatgggcgaaaccggtcatcatcggcgatggtttcggtacgatcggcggcgccggcgatttcagccgcaccagcagacgcgccaccatcagcacgaaaatggtgatcccgcaggaaacatgcaccatattaatcaatggccgctcactgcggggaaaaaacccgcgcagctccatcgccgcataggctactactaccagcaaaaaaaccagccagtgaatcccaatctgcaggccggaatatttatcgcgcatggcatatcctttatggaaagtatgatgctgccaacatagcggcgttcccttaaattttcattaacctttacgtagaattaacaattgattaccgctttctgccgagccgctatgccacgcttaacgcacgctctttcctggccgaacgacaaaccgtccaccggtcattacaaaattacacagttttgttacttaccgcgctactgccgccgctatagtacagaatgtctggcagaccacacggccctgggagataagaatgaaggaaatcggcttaccgttattgctactgaccgcgctggccagtccggcttttgctgcagactgtcagccaaacggcattggcggctctttttgcattaacgatgacggtacgactaccgacacggtgcctaacgaagtcaacggcatggatacgtactcgaataatggcggctataccagttccctgcccgatcggtcaggggcggatgaagcactggaaggttcatcgctgtcgacgcagcaaggcgtcggcagcggacagagcgacagtgcgctggcgggtcgcgactggcattcgcccgccaatctgaatgatggcgccgccacctccagtatgagcctgctggataaaccctgaggccagcggctaagcgagactccagcctgcggcgccgatggcgagggcgaaaagcaggcaggccagcgccgtcttgcgtaacagcatggtatagaatgaaattgcgacgccaatgaataccaccagcagaatcggccacatgcttaataacaacagcagaaaaccctcaatattgttatggattacgctctccacatccgcatccttgcctcatcgtcgataaagtaagcagaatttaatatgtaacatgaatacattcaaataaaatataattgtaaatggttatgcaccgcctcctgcggttggcggtgggtcactttcacgcgtccggagctttggcatcaaaagcagttcgcaaaaaaacacgtcaggattgttccatgaccctttagcggtacgctcgtattctcgctggtatcctgcaaattcttcacgccattattcggcgcgggtatctgacacaatgcgccggcgatgacagtcgcctggttgcagtttatccccctgagcggaacgcacatccagatactgaaggggctggccgtgcgcgttatccagcaggaccgaataggtttccccttgctcaaacatataacgctctccccattgccgcagcgccacaacaatgggaaacacggagcgccccttttcagtcaggacatattccttgtatgcgctgccatccgatgccggtaaaatctcgaaaataccgatatcaaccagatgcttcagccgcgaggcaaggatatttttggccagccccaaatttttttgaaactcgctgaatctccgcacatcgtcaaatgcttcgcggataatcatcaggcaccagcgttcaccaattgattccaacgttctcgccaccggacactcactggttctaagtgattcctgctttgccatctgcgcgctccttatcaatttatctactgatctagcttaatcctcacctttaccagttgcaaaaaaaaaccagcaaggctaattctataggtacactagttttaaaaagcaaccagacagagggtctcttatgaaatgtaaggcaagtagatgtaccggccaaaggatccaaactgcgtcagtccctgacacgatgctgaccacagggataacggcgttgttttcactaacctgcgcgctggcagtagccaatgtttattcagcacagcctttactcgactcgatggcggtcagcctgaaggtgtcgccaggcatgattggcagcgtcatcaccgctacgcaggcgggctatgccattggcttgctgttcctggttccgctcggggactggttgaaccgtaaatacgtggtgatgagtcaactgttgctttcagtagcggcgttagtcgcggcagggttatcccccaatatagcaacgctgcttggcgccatgctgatcgtcggcctgatggccgtggtggtgcaggtgctggtggcctgggtggcagtactggcgacgccgcagaaacgaggccaggcggtgggtaccctgaccagcggcattgtttcaggtatcctgttatctcggtttatctcaggcgcgatagccgatatcgccggctggcgagccgtgtatctcacggctgcctgtctgatgttggtgattgcaggggtcgtctggaaaatcatgccttcgcccccgcagcagccgcagccgcaaaagccgacttacctttccttattgaagtccgtgtttcagctgtacctcaccgagccgcaactgagaaagcgcgggatcctggcgctatttatcttcgccgctttcagcatgctatggacgaccatggtcatgccgctcaccgccctttccctctcgcacacccagacggggatgtttggcttagccggcttcgctggcatgctggccgccgccagagcgggcaagtgggctgaccagggatgggctcagcgcactaccggcctggcgctggcgctgctgaccatctcatggcttcctatcggctatgccgaaacctctctgctttggctgatagctggcgtcattgcgctggactttgcggtacaggccgttcatgtctccagccagagcctgatcattgccgccaggcctgcagcggcaagccgcctggttggggcttacatgtgtttttattcgctgggcagcgcgacaggggctatcgttgccacacagctttattcccactggggatggcaggcggtctgccttgcgggcgccgcggtcagcgcgtgtgcatttctgatctggtcaggatcgcgtcaatcatgatattcgttctgcgttttaaaggggccagtcaaaaagaccgtaatgctgacctgattgctgccagctatttgtatcgcatacattttttcaatgcttttaaacagttatgttcatgttgtataatgacgtgcactttaactaaaaaaagagtgcgaccatgattgattcctcattgccattaaccgacattcatcgtcatcttgacggtaacatccgggcccaaaccatcctcgatcttggccgcgaatttaatatcgctcttcccgcaaccaccctcgacacgctgcgtcctcatgtccaggtcaccagccttgagcccgatctggttagtttcctcgccaagctcgactggggggtaaaggtcctggcctcgctggaagcctgtcgccgcgtggcgtatgagaacgtcgaagacgcggcgcgaaatggcctgcactacgttgagctgcgcttctctccccgctatatggcgatgacccaccggctgccggtcgacggcgtggtagaggcggtaattgccggggttcaagagggatgccgcgatttccaggtcgacgcccggctgatcggtattctgagccgcaccttcggcgaagccgcctgtcaggaagagctggcggcgctgctcgcccaccgcgagggcatcactgccctcgacctcgccggcgatgagctcggcttcccgggtacgctgttccgcaaccattttaaccaggctcgcgacgccgggtggcatatcaccgtccacgcgggcgaagcggccggcccggaaagtatctggcaggccattcgtgagctgggcgcggagcgcatcggccatggggttaaagcggtagaggatccagccctgatggactacctggccgagcaccgcatcgggattgaatcctgcctgacctcgaacgtgcaaaccagcaccgtggcctccctggcccagcatccgctgaagcagttccttgagcacggcgtgctggcgagcctcaacactgacgatccggcggtccagggtgtggacatcattcacgagtataccgtggcggcgccggcggcagggctgagccgggagcagatccgtcaggcgcagatcaacggcctgaccctggcgttcctcggcgaacaggaaaaagccgccctcattcagcgggttgccaaaggctgataaccggcccggcagccgtgctgccgggctcctcctcagaccaggctgagcgtggcgcgatgtctggccgactcgatacccaactcaatcagggtcattatctgaatcgcctcgctggccgggaccgggttttcccctacgccgttaagggcgtcgcggatagcggcatagtaggcgggataattacccggtagcgtcagccatttctcctgactacgttcatccccttcggcgcgggtcagggtaccgtcgcgcatatcatatccccagtcctcctgcggcagccgttcaccgttttttagccgctcctcctgcgggtcaagaccgtacttaatatagctggcccgcgagccgtggacgataaagcgcgcgctctccgcggcggcgagtaacgtaccatgcagtactacccgccgctgcggataggccagcacggcgtgaaaatagtcggtggattgcgcgccgggccgaagctgcgcgaggtccaccgtgatgcttaccggcaggccaaacagcaccacgacctggtcgagcagatgcggcgcgaggtcataccatatgccgctgccaggacccgcctgctcacgccagcgctggcgcacctgtggtcggaagcgatcgaaatgcgactcgaagtaacacacctcccccagctgaccttcgttgattaacgcgctgaccgttaagaaatcgctgtcccagcgccggttatgaaacaccgaaagtatccgaccgcagtgcttcgccaggctttccagctcgcgagcttgtgacagtgtcacggtaaagggcttatccaccacaacatgctttcccgcctccagcgccgctttcgccagcggaaagtgggtgtcgttcggggtggcgatgaccaccagatcgatatccgggtcgtccagcagatcccccggcgcactcattaccttcacgccaggccaatcggcatggaccttatcggcgtcgctgctggcgaccgccttcagcgccatacccggcgtgccgccgatcaacggcgcatgaaacgttttgctggcgtaaccgaaccccaccagccccacccggatcgcatcgctcatcttaccgcctcgcttatgcaactgatatcaacaccaggttaatgagaataattttacaaaccgtgagcaaaacttatcattccttactttgcgacttacatgcaagtgtgagaaatcagacagataccccttgtgatctgctgaccatcgagtaacatttcacgctgtgttcaaaggatattgaagtgttatgacaactgtttttacccgtattgtagaacttattggctggattgtttttggtatttcggcactgcttttggttatcgcacaccatatagataactatcagtccccaccgccagcggatgtggtgcacacgaagtagctccgcgttaaaacagtgacccgcctcgcaactgtgcaaccggtttcagaaaccggttgcacatatgttcgcggttttattacactccctttatcatcagacagggagctttttcatggccgcttttccgcacaatttcttatggggtgccgctaccgcagcgtatcaggttgagggaggacacgacgccgacggtaaaggaccgtcaatctgggatatctactctcatctgccgggtaccacctttgaaggcaccaccggcgatattgccgtcgaccactatcaccgttttcgcgaagacgtggcgttaatggccgagatgggcctgcaaagctatcgattctccatctcctggccccgcctgctgcccgccgggcgcggtaaggtgaatgaagcgggagtccagttttacagcgatctgatcgacgaactgctggcgcacaatattgagccgatgatcaccctctatcactgggatctgccgcaggccctgcaggatgagggcggctgggaagcgcgcactaccgccgaggccttcgccgagtacgcccgcctgtgctatgcgcgctttggttcacgggtgaagctgtgggctaccttcaacgaaaccattgtcttcattgggcacggctacattaacggcctccatcccccggcggtccgcgatccggcgcgtgccattcaggcctgccaccacgtgtttgtcgcccatgcgctggcggtgaaggcctttcgcgagatggctgtggccggcgagattggcttcgtcaacgtactgcaaccgcataccccgctcaccgacagcgaggcggacattaaggccaccgaactggctgacgccatccatactcactggctgtacgatccggtgctgaaaggcacctatcctgccgacctgctggcgcagacccaggcgctgtggggggtacctcgctttgctccaggcgacgacgcgctgctccgtgacaaccgctgcgactttatcggtctgaattactatcgccgggaaacggtatctgcccagccgcctgagatcgctaccggcggcgagcctggcgtggagggattattctatttcgtgcgtaatccccagagtacatataccgaatggggctgggaaatctggccgcaggggctaactgacggcattatgatgattaaggcgcgctatggcgatattccgatatatatcaccgagaatggcctcggcgcgaaggacccgattattgacggggaagtggtcgacgacccgcggattgattatctcagcagccatattagcgccctcgaaaaagcgctggcgctgggggcagatgtgcgcggctattacccctggtcatttatcgatctgctgagctggctcaacggctatcaaaagcaatatggttttgtctatgtcgatcaccagcaaaatctggcgcggaaacgaaagaagagtttttattggtacaaatctgttattgccagtcacggcgaacagcgttaatcttctcttgcgggcgccattcggcgcccggtctgattttagaatattcttaaacttctccctgctcttcaaggctggctttgccccttgtcatgggtttatataacctgattcattccacgcggccccagcagaaggcgccgttggttgagagtaggtttagtgaatgctgataatattcaacgcaataattccgattataaaatggatacgaaaatgaccgtgctggactacttattaaaatttcgcaaaatcagttcgctggaaagccttgaaaaactatttgatcaccttaactactccctgactgacacccaggagatcgtgaatatgtatcgcgccgccgatcatcgtcgcgcagagctggtctccggtggtaaattgttcgatgtgggccaggttcctaaatccgtttggcgattcgtgcagtaaggctgtcatccttcacgccagttgcttatacttcccggcctgattttattcactggcgttgaataggggagaaacatgacgtctcaatctgcagagcgcatcggcggatggctgctggctccgctggcctggttgctggtggcgctgctgagcgcctcgttatcgctgctgttttttgctaatgcgctgatgtcgccgcagacctataccctactgcgcgccatgagcgcgggccatatggcgctgtgggtcgcctcgctgctgtttgcactcgccatgtggtattacacgctctggctgactatcgcctttttcaagcggcgctcggtggtgccgaaacactatattatctggctgctcatcaccctgctgctggcgataaaggcttttgccttctcgccggtctcggatgtgcttgccctgcgtcagctgctgtttccgctgctggccgctgcgctgctggcgccctattttcgccgttcgcagcgggtaaaacggacttttgttaatccgtaatacccccacacttaacctgttgtcgctggtatcgttttattcgataataagcggctttttttcgtttcaggtcgcatgatggctgattatttactgctctttattggtacagtcctggtcaataacttcgttctggtgaagtttcttggtctgtgcccgtttatgggggtttccaaaaagctggaaaccgcaatggggatggggctcgctaccaccttcgtgatgaccctggcctctatttgcgcctggctgattgatacctggatccttatcccgctaaatttggtttatttgcgtaccctggcctttattctggttatcgccgtggtggttcagtttactgagatggtggtgcgtaaaaccagcccggcgctctatcgcctgctggggatctttctaccgctgatcaccaccaactgtgccgtactcggggtagcgctgctgaatattaatctgggccacaatttcctgcagtcggcgctgtacggctttgccgccgccgtcggcttctcgctggtaatggtgctgttcgcggcgatccgtgaacgcctggtggtggccgatgtccccgcgccgtttcgcggtaatgccatcgcgctgattaccgccggtttaatgtctctggccttcatgggctttagtggtttggtgaagttgtaatgagcgcagtctggatagccgtgatcgccatcagcctgttagggctgattttcggcttaatactgggatacgcctcgcgtcgtttcgcggtgcaggacgacccggtggtggaaaaaattgatgagctattgccgcagagccagtgtgggcagtgcgggtaccctgggtgtcgcccctatgcggaagcagtcggcgtacagggtgagaaaataaaccgctgcgcgccgggtggcgaagcggtgatgttaaaaatcgccgccttgctgaacgtcgacccgcagcctgtcgacggcgacgcacaggaagcggagccggcccgcatgctcgcggtaattgacgagccgaactgcattggctgtaccaagtgtatccaggcctgtccggtggatgccatcgttggggcgacccgcgccatgcataccgtgatgagcgacctgtgcaccggctgcaatttgtgcgtcgccccctgcccgacccagtgcatttcactcgttccggtggccaccaccccggagacctggaaatgggatctgcatacgatcccggtgcgaaatattcctgtggaacaacatgtttaagctattttccgctttccgaaaagacaaggtctgggatttcaacggcggtattcacccgcctgaaatgaaaacccagtctaacggcaccccgctgcgtcaggtttccctgccgcagcgctttgttatcccgttgaagcagcacattggcgccgagggcgaactgtgcgttaaagtgggcgaccgggtgctgcgcggccagccgctgacccgcggctggggaagaatgctgcccgttcacgccccgacttccggcaccattgccgccatcgctccgcacactaccgcgcacccgtcggctctggcggagatgagcgtgatcattgacgccgacggcgaagaccgctggatcgagcgcgatggctggagcgactatcagacccgcacgcgtgaagcgctgatcgagcgtatccaccagtttggcgttgctggcctcggcggcgcaggcttccccaccggcagtaaactgcgcggtggcggagataaaattaaaacgctgatcattaacgccgccgagtgcgagccctatatcacggcggatgaccgcctgatgcaggactgcgcggcgcagattgtcgagggtatccgcatcctcgctcatatactgcagcctgaagaagtgctgatcggcattgaagacaataagccgcaggccatctcaatgctgcgggcggtgctctgcgacgcccatggcatttcgctgcgcgtgatccccaccaaatatccctccggtggcgccaagcagctcacccaaattctcaccggcaaacaggtaccgcacggcggtcgttcatcggacattggcgtgctgatgcagaacgtcggtacggcttatgcggtgaaacgcgcggtggttgacggtgagccgttaaccgagcgcgtggtcaccctcaccggcgaagcggtaaccagaccgggcaatgtctgggcgcgtcttggcacgccggtgcgccatctattgaacgatgccggcttctgccccagcgccgagccaatggtgatcatgggcggcccgctgatgggctttaccctgccgtggctcgacgtcccggtggtgaagatcaccaactgtttgctggcgccttccgccagcgagatgggcgaaccgcaggaagagaaaggctgcattcgctgcagcgcctgcgctgacgcctgcccggccgatctgctgccgcagcagctgtactggttcagcaaaggtcagcagcacgataaagccactgcccataatctggcggactgcatcgagtgcggcgcctgcgcgtgggtatgtccaagtaatattccgctggtgcagtacttccgtcaggaaaaggccgagatagcggcgattcgtcaggaagagcagcgcgctgcggaagccaaagcccgattcgaggcccgacaggcgcgcctggagcgtgagaaagccgcgcgcgccgagcggcataaaaaagccgccgttcagcctgccgccaaagatcaggaggcgattagcgccgccctggcccgggtacgggataaacagcgcgatgccgcgcagccgatcgtgatccaggccggcgccaaacctgacaacagcgaggcgattgccgcccgcgaagcgcgtaaggctgaggcccgggcgcgtaaagcgcagcagcaggccgcgccggtggaagccccggccgccgaaccggtcgacccgcgcaaagcggcggtggaagccgccatcgcccgcgctaaagcgcgtaaagccgaacagcaggccgcgccggtggaagccccggccgccgaaccggtcgacccgcgcaaggcggcggtggaagccgctatcgcccgcgctaaagcgcgtaaagccgaacagcaggccgcgccggtggacgccccggccgccgaaccggtcgacccgcgcaaggcggcggtggaagccgctatcgcccgcgccaaagcgcgtaaagccgaacagcaggccgcgccggtggacgccccggccgccgaaccggtcgacccgcgcaaggcggcggtggaagccgccatcgcccgcgctaaagcgcgtaaagccgaacagcaggccgcgccggtggacgccccggccgccgatccggtcgacccgcgcaaggcggcggtggaagccgccatcgcccgcgccaaagcgcgtaaagccgaacagcaggccacacaacaggatctcgcgtcagccgcagccaatgacgacccgcgcaaagcggccgtcgccgcggctatcgcccgcgttcaggcgcgtaaagcaacacagcaggcagttaacgaggaataaatggttttcagaatcgcaagctccccctatacccataaccagcggcagacctcgcgtattatgctgctggtgctgctcgccgctgtgcctggcattgtggtccagacctggtttttcggctggggcaccgtactgcagattgtcctcgccgccctgacggcctgggcgaccgaagccgctattctcaaactgcgtaaacagcctgttgctgccacgctgaaagataattccgccctgctcaccggcctgctgctggcggtgagtattccgccactggccccgtggtggatggtggtgctcggcactgcctttgccgtagtcattgccaagcagttgtacggaggcctgggccataaccccttcaacccggcaatgatcggctatgtcgtgctgctgatttcgttcccggtgcagatgacctcctggctgccttcctatgagatagccgcccatatcccggcattcagcgacgcgctgcagatgatcttcaccagccataccgccgccggaggcgacatggccagtctgcggctgggtatcgacggcgtcagccaggccaccccgctggatacctttaaaacctccctgcatgccggacatagcgttcagcaggtgctgcaattgccggtctacggcggcgtgctggcaggtctgggctggcagtgggtgaatatcgcctggctggcaggcggccttttcctgctgtggcagaaggcgatccgctggcatatcccggtcagcttccttgttagcctcggcctgtgcgccaccctcggctgggttttttcgccgcagagcctggcctcaccgcagatgcatttgctctccggggcgaccatgcttggcgccttctttatcctgaccgatccggtgacggcctcaacaaccaaccgcggccgtctgatctttggcgccctcgctggcctgctggtctggctcatccgcagcttcggtggttatccggacggcgtggcgtttgccgttctgctggcgaatattaccgtgccgctgatcgattactacacgcgcccgcgcgtatatggccaccgttgagagagcaatgatgttaaaaacgatgcgtaaacacggcgtcacgctggcgctgtttgccgccggttccaccgggctgacggcggcgatcaatgagctgaccaaaagcaccatcgaccagcaggcggccctgcagcaaaaggcgttattcgaccaggttttacctgccgaccgctataataacgatctgcttaagagctgctatctggtcagcgccccggcgctgggcaaaggccagcataaagtgtggatcgccaaaaataacgatcgaccgatcggcgcggtgatggaagccactgcgccggacggctactccggagcaatacagctgctggttgccgccgattttagcggcacggtcctcggcacccgcgtaactgagcatcatgaaacgccgggcctgggggataaaatcgaacttcgcctgtcggactggattacccattttgccgggaaagtcatccacggccagggcgatagccactgggcggtcaaaaaggatggcggcgattttgaccagttcaccggcgccaccatcacccccgggcggtggtcaatgccgttaagcgcgcaggcttatatgcacaaacgctgcctgcgcaacttcctgaattcaccgcctgtggagaataaccatgagcgaagttaaagacgtcatcgtccagggcctgtggaaaaataactccgccctggttcagctgttaggtatgtgtcctctgctggcggtcacctcgaccgccaccaacgccctcgggctgggtttggccaccaccctggtgctgaccctgaccaacctgaccatctccagcctgcgccgctggaccccggcggagatccgcatcccgatttacgtgatgatcatcgcctcggtagtgagcgtggtgcagatgctaatcaacgcttatgcgttcggtctgtatcagtcgctggggatatttatcccgcttatcgtcaccaactgcatcgtggtaggccgtgcagaagcctttgccgccaaaaaagggccggcgctgtcggcgctggacggtttctctatcggtatgggggccaccggcgcgatgttcgtgctgggctccctacgcgagatccttggcaatggcacgctgtttgacggcgccgacagcctgcttggcagctgggcaaaggtgctgcgcatcgaggttttccatacggacacccctttcctgctggctatgctgccgccaggcgcctttattggcctcggcatgatgctggcgattaaataccttatcgatgaacgtagcaaacagcggaaggcgcaagcggcccgggccgtctctgtcgccccgtccgacgtgacagggaaagcataatatgaacaaagccaaacgcctggcgatccttaccaggctgcgggaaaacgatccccaccccaccaccgaactgcatttcagttcgccattcgagctgctgattgccgtcctgctttctgcgcaggccaccgacgtaagcgtcaacaaagcgacagccaaactctatccggtggccaatacgcccgcagcgatgctggccctgggggtggatggggtgaaatcgtatatcaagactatcggcctgtttaacagcaaagcggaaaacgtcatcaaaacctgccgcatcctgttggagcagcacaatggcgaggtgccggaagacagagcggcgctggaggcgctgcccggcgtgggccgtaaaaccgccaacgtggtgctgaataccgcctttggctggccgaccatcgccgtggacacgcacatcttccgcgtctgcaatcggacgcaattcgctcccgggaaaaacgtcgaacaggttgaagagaagcttctgaaggtggtccccgccgagtttaaggtcgactgccatcactggctgatcctgcatgggcgttatacctgtattgcccgcaagccgcgctgcggctcctgcctgattgaagatctttgcgaatacaaagataaagtctacgcctgactgtctcgtctctattgcggtcatagcttaactctgggttatggcccgcattcatctatttcaccggccattaacaccacataatcatcatgattatggatgattatccggttatataacaaacaactagttcattcattttttatcagcgcaaaatttctatgcatttgtgatccagatcatgctcgcaactttatgttgattgaatgttactggaatggaaataaatgtcaggcaatacaacggatgagtaaagattgtcaggataatgacccatgattttttaagataatggaccatatcactatgcttacgccagatcagtagaatatatcgccttttcacggcaaaccggcgaacccgaaagataaaaataccaacgatatcgaaacggtaaaatttaacgctgtataacattcatatgtctggagcattataccaccctgattatgtgtaacagattattacaaaagccttgcctgatgcgccaggatagtgaacattacttgccgttttccctccaagaataactataaaggcggcggtccaacgagattgcgccccgaacaccccccagtaaatatgggatgtaaaaaaagaggtatatgtgtctactgcaaacaataaaccagcagaaagcgtgagtctgaacgctttcaaacaaccacgcgcgttctatctcattttctcgatcgagttgtgggagcgttttggttactacggcctgcaagggatcatggccgtttacctggtaaaacagctgggtatgtcggaagcggattccattactctgttctcctcctttagcgcgctggtttatggcctcgtcgccattggcggctggctgggtgataaagtgctgggtaccaagcgtgtcatcatgctgggcgctatcgtgctggcgattggctatgcgctggtggcctggtccggccatgacgccgctatcgtctatatgggtatggcgaccatcgccgtcggtaacggcctgtttaaagccaacccgtcctccctgctttctacctgctatgacaaaaacgacccacgtctggacggtgcatttaccatgtactacatgtccatcaacatcggttcgttcttctctatgctggcaaccccgtggctggccgcacgttttggctggagcgtagcgtttgccctcagcgtggtggggatggtgatcaccattattaacttcgccttctgtcagaaatgggttaaacagtacggctctaaaccggactttgccccggtacacatgggtaaactgctggcgaccatcgctggcgtggtggtgctggtcgctatcgccacctggctgctgcataaccagggtatcgcacgtatggtgctgggcgtcgtcgcactgggtatcgtcgtgattttcgccaaagaaaccataggcctgaaaggcgctccgcgtcgtaaaatgatcgtcgctttcctgctgatggtagaagcgattgtcttcttcgtgttgtacagccagatgccgacctcgctgaacttcttcgccatccgtaacgtggagcactcgatcctcggtctcgcctttgaaccggaacagtatcaggcgctgaacccgttctggatcatgattggtagcccgattctggccgccatctacaacaagatgggtgaccgcctgccgatgccgcacaaatttgctatcggtatggtactgtgctctggcgcattcctcgtcctgcctttaggggcgaagttcgccagcgacgccggtatcgtctcggtcaactggctgattctgagctacgcgctgcagtctatcggtgaactgatgatttccggcctcggcctggcgatggtcgctcagctggttcctcagcgtctgatgggcttcatcatgggcagctggttcctcaccacggcaggcgcggcgatcatcgccgggaaaatcgctaacctgatggcagtcccggagaatgtcaccgatccgctggtgtcgctggaagtgtacggtcacgtattcctgcagattggtatcgtcaccgcggttatcgccgccctgatgctgctgaccgcgccgaaactgaatcgtatgactcaggacgacagcgcggacattaaagcacgcgaaaccgcggctgcctgacgccgcagggaaaactaattatttttaagccgctaacgttagtttagcggctttttttttacccctggcaggactaacatacagaaaactgcagccacgaggagtcacgcatgaaactgttctacaaacccggcgcctgttcccttgcctcgcatattgccctgcgcgaaagcggtctggattttaccctgcagagcgtggatctggcccaaaaacggctggaaaacggggaagactatctgctgatcaacccgaaaggtcaggtgccggcgctgctgctggatgatgatatcctgctcactgagggcgtagccatcatgcagtacatcgcagaccaggtgccggatcgtcatctgctggcgccggtgggctcgattgcgcgctatcagactctcgaatggctgaactatgtggccaccgagctgcataaaagctttactccgctgttccgcccggataccccggaggactataagcctgtcgcgcgggggctgcttgagaaaaagctgcaatacgttgatgcagcgctggcagacaaacagtggctgaccggccatcgcttcaccattgccgatggttatctgtttacggtgctgcgctgggcctatgctataaaactggatatggctgcctatggtcatatcggcagctggatgacgcaggtggcagcgcgtccggcggtggcggccgcactggcggctgaaggcttaaaataaggcctgaacctgcccggcggaccgtcgggcaggccctgggagttacagccgggtggcgctgaagcagtgctccggtacggcgatgcgatcctgcgccgctactacctgtagttcgtattcctgcatatttttggtggcgagcataatctcgtacaccgcggcggtgacgtgttccagcgcatcgcgcagacttgccccctgcagcaatttaaccaacagcagaccgctggtcacatcgccgacgcccaccggctgacgcaggccgaaatccaccagcggccgactaatatgccaggcttcttcggccgtcaccagcagcatctcaaaacgatccatactcagacccgcacgggcaagatgcttaactaataccacttccgggccctgggcaatcagctcccgcgcggcggccactgcctcgctgacgctggcgaccggatgaccgcacaggatctccagctcaaccagattcggcgcaataatatcgctggccggcagcgcatagcgcacgtggaactccgccacgcccggcgcgacgatgcagcccttctccgggtgacccatcaccggatcgcaaaaatatttcgccgccggattggccgccttaacctgacgcacgataccgaggatatgctctccctgctcagcggagccaagatagccgctcagtaccgcatcgcaggtctggagcttgtcgatatcggcaatcccctgaacgatctccgtcaaatgcgaaggcggcatgacgcagccggtccatttgccgtactgcgtatggttagagaactgtacggtattcaggggccagacattggcgcccagacggcgcatcggaaattcggcggcactgttgccggcatggccaaacacaacgtgagactgaatggcgaggatgttcttcattttcttaccacaaccctaaaaagaaaaagggcgtggtttcccacgccctggcagtatttttttatttccagcagaccaggcagtaatttttcttaccgcgacgcagcaaggtgtagcggccaaacaggcgatcgctgtcactgaatacatattccgggtcggcctgtttttcgccgttgatggtcaccgcgttagaggcaacggttttacgcgcctgaccgcgggacggctgcagctcggaatcaaccagcgcctgcagcagatcggcgcctttttccatttcgatcatcggcacgccatcctgggccagctgttcgaagtctgcttcgctcaggtcgctcaggttaccgttgaacaggctttcggtaatgcgcttcgccgcttccaggccttcttcgccgtggacaaggcgcgtcacctgctctgccagcacgtactgggcgcgcggcgctttaccgctgtttttgtcttcttcttccagggcattgatctccgcaatgtccataaaggtgaagaatttgaggaagcgatagacatcagcatccgcggtgttgatccagaactggtagaatttgtacggactggttttcttcggatccagccacacggcgccgccttcggttttaccgaatttggtgccgtccgctttggtgatcagcggtacggtcaggccaaacacctggttctgatgcagacgacgggtcagatcgatgccggaggtgatgttgccccactggtcagaaccgccgatctgcagcgccacgccgtgcagcttgttcaggcaggcaaagtcgtaaccctgcagcagattgtaagagaactcggtaaaggagataccctgatcgtcacgattcagacgctgcttcaccgcttctttgttgatcatctggttaacagagaagtgtttaccgatatcgcgcaggaaggtcagcacgttcatgctgccaaaccagtcatagttattcgccgcgatcgccgagttgtcgccgcagtcaaaatcaaggaacggagccacctgtttgcggattttatccacccactcctgcacggtatcctcggtgtttagtttacgctcagcggctttgaagcttgggtcgccaatcagaccggttgcgccgcccaccagcgccacaggtttatgacctgcctgctggaagcgtttcaggcataacaatggaacaagatgccccaaatgcaagctgtcagcggtaggatcgaagccgcaatagagcgcgatcgggccttgcgccagtcgctctgctaacgcttcctcgtccgtcacctgggctaccagcccccgctcttgcaattgtttaatcaagttactgcttgccatcaaattctccatgtataaacgactgcacctctgccggtacacgacctttcgccagatgcgaaaagtacatagaataaagcgccggccctttcagcgccagcgcttcgataactaatttcggcgtttacggcgccagacggtctattttccaggcgccgctctcgcgctggtataaaaagcgatcgtgcagacggtgttctcccccctgccagaactccatctgctcaatgctgacgcggaatccgccccagaagctcggcaacggcacttcaccctgctggaacttctgcttcagctcgaggaatttgctttcgaggatgccgcgggctgagatccggctcgactgcttcgagacccaggcgccaatctggctgtcgcgcggacggctgtggaaatatttgaccacttccagcgtcgacagacgctccgctttgccgattaccatcacctggcgctccagcatatgccacgggaaaagcaggctgacctgcgggttgttttcaatttgatgcgctttgcggctgccgaggttggtataaaacaccaaccctttttcgtcgtagtgcttcagcaacacaatgcgctggtagggctggccgcgctcatcgacggtggcaaccaccatggccgtcgggtcggcaagtttcgcatcgcaggcctgacgcagccagcgttcaaacagcggcaggggttcagcaggaagatcgtggcgacgcaaaccgccacgggtgtattcacggcgcaaatgcgcaatttgctggagttcgtcgttatcagacatggccattgaggatgtagtcataaggtggcgttattgtgcgccccccggacagaaatctcaacgtttggccgtctgcagctgacagttatcaaggacgatgcggtcgcgcttatagacggtggcggtatcgccttttgaccagaacacatagacgccgtcggtgtagcgcgccccggaagccgacagcccctcagacaggttcagttgctgattatcatagataaaactgacctgctggcgtgcgttattgcgatggaccgtcaatggtttctggtcgcattgatactccagcgtgtccgtctgcatccgctcgacaaactggttgtagtagctacagcccgccagcataaaaggtacaactgcgataagaatttttttcattcgtttgccttcgactttcccggtcacggcgggcactccgccctccgcttaacttgtccagtttaccggtcgcatcgtatttaagatttcagttaactccgattctgcggcgggttagccggaaaaatggcgcccagcaccgaggcttcgctggcgccggtcacggagggcagattgcccggcagaccagccagcgttcgccaggccagccaggcaaaggccagcgcttccatatcatcgccgctgatccccgcctcatcggtggtggagacctcggttcccggcagcagcgccgccaggcgcgccattaacaaggggttacgcgcgccgccgccgcacactaacaaacgctcgcagccgccgcttaacaatacctgctcactgatggtgacggcggtcaattccgcaagcgtagcctgaacatcctccccgcgtagccccggatagcgggccatatgctgctccagccagccgtaattgaaatattcccgaccggtgcttttcggcgccggcaaggcaaaccacggatcgctcagcatgtcctgcagcagcggcagcagcactttaccttcgctagcccattgggcgtccttgtcgtacggtttgcccttctggcgccagatccaggcgtccagcaacatatttcccggcccggtatcatagccgcgcaccggctgccctggcgccagcagcgacacattagcgatcccgccgatattgagcaccatacgtcgctcaacggggtgggccagcagcgcatgatgaaaagccggcaccagcggcgctccctgcccgcctagcgccatatcccggcgacgaaaatcccccactacggttatcccggtgtgggcggcgatctggttgttgtcaccaatttgcagggtatgcggagcctctccctgcggttcatgccatacggtctgtccatggcagccgatggcgatgacgtcggtgggtttgagactttcctggctcatcagcgccagtacggcatcggcaaacagccgtcccagacgggtgtccagacgacctagctgcgaaagggtcagcgactgcccctgggaaatcgccagaatctcttcttttatcgcgtgtggaatgggccaggtgagactagcctgctgcgccaccatgttttcagtaatggtggccaaaacgacatcgataccatccaggctggtaccagacataacgccaataaagcgacccgatctcatacgttttccttcattccatgacccttgtatgcccttcactccatcataaagtgtcggttaatgctatgttgtactaatactttttaacaatagagcgacaaatcagagaacatcgtaaagaaccggcgtttagttgaggttgaagcaccagtgtttattattttttgtatagtccagggagaacctatgcccgccgacgactaaatgccatataattaaccgtatggacgttcaattgaacaccttcggtgaacaggagattcataaatgattttacgtgttttggctgtatcgatgattggttttacgctcgcaggctgcgtgagcagcagcggcctgtccggcgacgtttattccgcatctgaagccaaacaggtgcagagcgtgacttacggtactatcgtgcatacgcgcgccgtacagatccagagcggcgacgatagcaatgccatcggggccattggcggtgcggtactgggcgggttccttggaaacaccatcggcggcggtaccggacgctctctggctacggcggcaggtgcggtcgcgggcggcgtagccggtcagggcgttcagggcgcgatgaataaaacgcagggcgttgaactggaaatccgtaaggacgatggcaataccattatggtagtgcagaaacagggcagcactccgttctccgttggtcagcgcgtggccattgccggcagcggcagccaggtcaccgtctctccgcgataatttcccttacgatgcggccggttgcgccgcatcgtatttttcagccacgtttatttcgccgtaataaattcgtagtaaccatcagacatctttactttaatattccatgaatcattgcgcctgcgcaatatcttatctgcccgcccctattaccctcaagaacgtaaattagccctggtgactcatcgtcgctgccgttgccttttatgtggaatattgcctatgcccgaacatgtgcatcatatcgtcaaacgtctaatcctttatatttgcatttgtttactggccgggattggcatttccgggatgactgcgttttttcataccagcttcagtagtacttcctcaatattatttccgctgctgaccagtttcctgatggtttttcatattaccattgcctgttttatgggcatgaaatactggagcagcaagcggcgtctctaccttacaccggtctctttcgggtttgcctgctcagcgctgctgatgcttggcacgctcagcagctatccggactggcttacctgcaatccggccccggtcgttaatcaaaatgacgccgttatctattatttcttccgcaatataatgatggctgtgttattcatgtcatctattattttgtactattttcgccagcgcatcatgcattcgtggaaagcacacgttcttacatttacagcatgtatactttttacgttgaccattattgttttatcatggctatactccagccattcgccgtggctgagcgtcaattttatcgacgatctgagccatacctttaccccgttgtggcaaagtattatcggctggctgctgatggcagtttggttcatcacgctgattttattaattagcttgagtaaactgcgtaatattttttggttcagcggcgcttttttttgcagcgcttatttgttcacgcttttccagctgctctccaccgcaggggagctggatcagacctggtaccaggcgcgttttttcgaaacgctatgcaccttgttcctgattctggtgctactggttgacgtctttatcctctatcgcgagtctaaccacaaatatgtccattcgtatcagaattcgatccgcgacccgttgacccgcctctacaaccgcagctttttctacgacactcttaaccaacagctggcgaaggtgaatgcccagcatccgctgtcggtgctcatcagcgacctcgaccatttcaaacgcatcaacgatagctacggccatgtcgccggcgacaaagtgatccagttcgccgcctcggtgctggaaagccattcgcgggtagatgacgccgccgcacgcatcggcggtgaggaatttgctctgctgctggtcaacaccggtgaaaaagaagcgcaagcgatcgccgagcgtatccgcctggcggtcagtgccggggagagccatttaccggagcgaatgaccatcagcatgggggtgtataccacctacgacaatagcgtgacagcggaagcgtgcgttcagcgcgcggacgaagccatgtatgaagcaaagaataacggacgtaaccaggtgatcgtctggcatcggcagggagggtgaaaaaaggcccggattagcccgggccgcaaagaattaatctttagcctggagatcgaggatattttgttcaagtttacggattaagtggagcaaggtttccacttcctgcttcgagacccctgagaggatttcatcacgggtcttacctatcacctcttccatctcgttgatcagcggttcggctttttccgtcagcttgatgcgtttggcccgccgatcgcttgcgcaggtctggcgagaaatgagccctttctcctccagctgatcgagcgtacgcaccagcgacggctgttcaataccgatagctttcgccagctggatctgcgactgctcaggcggcagctggtggatgttatgcagcgtgacccagtgggtctgcgttaactccagaggtttcaggcgatggtcgattagcgcgcgccaaacgcgaactaaacgtgccagatcagaaccaagtggcgattccaatttcatctccttataattagcttgctaagttattatactgattttagaatagtgtgcagcatttgaattatcaaaacaaatgaattacttgattcaacaaaaaccaaaacaatgatttacactgttaaagagtagcacgtcctgaggttacccctgtaatggcaaaggatttttgcttgtgaaactgagtcttaacacatccggattgccgctgcaggacctggtgttcggcgcatccgtctatttccctccgctgttcaaagccgtcttgttgggtttctttatctggttgtttttacatcgccagctgcgtgactggatgtatgcgggcgacatctggcacccgctactaatggatctctccctgttcgcgctctcggtctgtctggccctggtattgctcattgcctggtgatctccctgttatgaaaagattaaaatatctgtcaacgctgctggtcgcggccgtcgccctgattgccgcatggttgttatggaatttctacactcagtcaccctggacccgcgacggcaaagtgcgcgccgagcaggttgggatcacccctcaggtctccggcagtattctgcagttgaacgtaaccgataaccaacgggtcaaagccggggaagtattgtttaccatcgacgacaccccctatcgcatcgcggtgctgaacgcccaggcgcagctggcgaaagcccaggcggaggtggcgaaagcgcaggcggagcaaagcaaggccgccagcgaggctcgccgtcgccgaagcctgtcgcaaaatgccatctcggctgaagatcttgagaacgtcaataccgccctgaataccgccaccaccaccctggctgccgccagagcgggggtcggcgtaaccgaagcggcgctgaaacatgcgcagtggcagctcagccagacggttgtcaaagcgccggtggatggctgggtgactaacctttccacccgcgtcggtgattacgctaccaccggccatccggtctttgccctggtggacagccactcgttttacgtgctgggctacttcgaagaaaccaaactgcgccacattcgcatcggcgatccggcacaaattattctctatagcaatcagcagacgctaaagggccatgtcgcgagcatcggccgcgcgattgtcgaccagagcgtggaacagggaaccgggctggtggccaacatcaaaccaaatatcccctgggttcgtctcgcccaacgcgttccggtgcgaattgcctttgatacgctgccggccgatgtcaccctggtctccggcaccacctgcactgtctcaattggcgggcagtaatgaacctgcagaccctgtcgtggcgcgcactcccctgggttaaagccacccggccgcagtggcggtacgcattgcgcaacggcatcgcgatgtgtcttgcgctgagtatcgcctatgcgctggatcttgatgagccctactgggcgatgacgtccgcggcggtggtcagctttcccaccgtcggcggcgtgatcagtaaaagttttggccgcatcgcaggcagcctgctcggcgcctgcgccgccctgctgcttgccggtcatacactcaacgatccctggctgtttctgttcagtatctccggctggctggcgctctgcacctgggcctgcgccctgttcaccaacaacgtcgcctacgcctttcagctggcgggctatacctgcgccatcatcgcctttccggtgattaacatcagcgacagctacgaactgtgggtcatcgcccagtcgcgcgtctgcgaagtcatcgtcgggatcctatgcggcgggctaatgatgatgatcctgccaagcacctccgacggcagcaacctgctgacggccctgaaaaccatgcacgcccggctgctggagcacgccagcctgctgtgggtgccggagacgacggatgccattcgcaccgcccatgagagcgtgattggccagatcctgaccatgaacctgctgcgtatccaggccttctggagccactaccgtttccgtcggcagaatcctctgctgaactacctcctgcatcagcagctcaggatgaccagcgtcatctccagtctgcgacggatgctgctgaactggcctgacgcgccggcgaacactcgccaggtactggagtcgctgctcgccgagctcgccacccctcatgccgacagctatcacgttgcgcggatcctggcgccgctggcgccgcggcaggatgccgattaccggcacatcgctttctgggcgcgattgcgctatttctgtcgcatttacctggagagcagccgctggatccgccgcgttgaaaatgcctcggcgatcgccgagttcaatgtgcccgccgccccgccgttagcccgccataccgatcaggcggaggcgttgctcaacggtgtccgtaccttttgcgcgctggtggcgattggcgcatgggggatcagtacccagtggaccagctgcgcggcggccctgaccctggcctccatctgctgcgtgctctactccgtatccgcctcgccgtttcgctcgctgacattgctgatgcagactctggtcctgctgtcgctattcagtttcgtggtgaagttcggcctgatggtgcaggtaaccgacctgtggcagtttctgctgttcctgttcccgctcctgaccaccatgcagttactcaaactgcagtggcccaaatacgccggcctgtggggacagcttatcgtctttatgggctcgtttatcgccgtcaccaacccgccggtgtacgattatgcggcctttttcaatgataatttgagcaagattgtcggggtaggctttgcctggctggcctttgcggtactgagtccgggctcggacgcccgcaaagggcgacgccatatcagagcgttacggcgtcactttgtcgatcagcttagccgtcatcctcagcacagtgagcatgaatttgaatcgctggtctatcaccacgtcagtcagctcagccagagtaaggatgccctggcgcgccgctggctgttgcgttggggcgtcgtgctgctcaattgctcgcacgtcgtctggcagcttcgcgaatgggaaacccgctccgatcctctcgcccaggtgcgcgacctgtgcatcaacctgttacgcgatgtgatgagcgagcgcggcgtgcaacagcgtccgctggcctccaccctgcaggagctgcagcggatctgcgacgccctgaaccaccatcatcagccggcggcgcgggaactggccgccgcgatttggcgactgtactgcgccttgtcgcagctggaacaggccccggtggccggcacaattggcgaaggaactacttaatcaccccgcaggcaaaccgttcgccgccgccgcccagcggctgcggactgtcggccatgttatccccgcctacgtggaccatcagcgctttccctttcacctccgccagcgttttcaggcgcggagcaataatcggctggtcggctacgcccgcatcgttgaccaccagcaggggcaggtcgccaagatgcccggctcccaacggcccttcgtgtttgccggtatgctgcggatcgtaatgtccgcccgccgccccggcggccacggctttaccttctttcatcgccggctggcagctgccttcggcatgaatatgaaacccgtgcttacccggcggtagcgcccgcagagtgggggcgaactcgagtccgcggtcggtttcggtgattttgacgctgccgatggtctgaccgacgccctgggtggtcacgagattaagttgcacatcttcactaacggcctgtgcgccagcgcaaaatgcgagggataagatcgcgagaatacatcgttgcataacacctccggatggctgtctccctgttaagtgtaaaccaggaacgcctttccggaggggaaatgcccgttacggtacgtcgtacccgagcgcggctttacggatgcggaaccactgctgacgggtcatgctgagtttttcagccacaatcgccgagcgcacgcgctcgattttgcccgagccaataatcggcagcggctgcgacggcagacgcagcacccaggcataaactacctgttcgatgctgtcggcgttaagctcgtgcgccacctgcgccagctcatcgcgcagcgcctggaagccctcttcgttaaacaggcgaccaccgccaagacaagaccacgccatcggacgaatacgcagttgctgcagctgatcgagagtaccgtcgagcagcagcggctgatgcaccggtgaaatttcgacctggttggtggccagggtaaacggcagacgtgactgcagcaaggtgaactgggcgggggtaaagttcgagacgccaaaatggcgcactttaccgctatgatgcagcgcgagaaaagcttcggctacctcgtcggcgtccatcagtgggtccggccggtggatcagcagcaagtcgagatggtccgtcgccagattacgcagcgattgctcggcgctgagcacgatgtgatcgcggtcggtaatgtagtggccaatggtgttctcagcgcgcgcccgggtggcgataccgcatttgctgacgatttccatccggctacgcagatgcggcgctcgcttcagcgcttcgccaaaggcagcctcacactgataatcgccatagatatcggcgtgatcgacggtggttacgcctaaatcgagatgctgctcaataaagctgaccagctcgccaggcgacattttccagtccatcagacgccagtagcccatcacaaaacgtgaaaattccggcccctggggagccatagcaatacgctgaaccataaccgcttcctcaataaaaaagtgctctgagtatacgtaatttttggcttaaaacagtgagggttgctgcggttcttccgccggctccggcctgttcgcgcgtattttgcgcagcagccgttggcggcaaagacgcaaaacctcctgtttctgcgcatcgctcatcgtttgccagttaaaacgttcctcacggctacggaaacagccgcgacagtagccgcgctcatcggtctgacatattccccggcacgggctctgcaccgggaaaaattctaactgctctgccaccacacgcctcctgtcccctcgtctcctttcattgaagacgtttccccgcgccgacgcaaattttgttcactacgtgctgcgccagctaacatttttccgctgacgcttgcattagaccaatcggtctactacagtgtgcagcatgaacagacacagcgattgcgatacccgagaacatatcctggccaccggcgagcagctttgcatgcatcgcggttttaccggaatgggcttgagcgaacttctgaagacggcggaggtgcccaagggctccttctaccactactttcgctctaaggaagccttcggcgtcgcgctgcttgaacatcactacaccggatatctgcagcgcctggtggaccacttcgatcatggcgacggtaactatcgcgatcgcctgctggcctactatcagcacacgctgaatcagttctgccagcaggggattattagcgggtgtcttactgtcaagctatccgcggaggtttgcgatctgtcggaagatatgcgcgccgccatggatcgcggagccagccagattatcgccctgctgggcgacgcgctggagaaaggacgtcaggaaggcagtctcgcatttgacggcgaggccatgaccctgtcgcaggtgctgtattccctgtggctcggggccaacctgcaggccaaaattacgcgtagcgcaacgccgctggaaagcgcccttgcccacgccaaacagattattgcggcgcctgcggtataacaggcgtttttatttcatcagttactagacgaccggtctactcaggagtcactatgtcggaagcaaaattattcagcccactgaaagtcggtgcggtcaccgtccctaatcgcgtatttatggcgccgttgacgcgtctgcgcagcattgagccgggcgatatccctactccgctgatgggcgaatactaccgccagcgcgccagttccgggctgatcatcaccgaagcgacgcagatctccgcgcaggccaaaggctacgccggcgcgcctgggctgcacagcccggagcagattgccgcctggcagaaaatcaccgccggcgttcatgccgaaaatggtcatatcgccgtccagctgtggcacacaggccgaatttcccatagtagcctgcagcctggcggcgccgccccggtagcgccttccgcgctgagcgcgggcacccgtacctcactgcgtgacgaaaacggccacgccattcgcgtcgacacctcaatgccccgcgccctggaaaccgcagagatcccagggatcgtcaacgatttccgtcaggcggtcggcaatgcccgtgacgccggcttcgatctggtcgagctgcactcagcccacggctatctgctgcaccaattcctctcgccatcggcgaaccagcgtaccgatcagtacggcggcagcgtggagaaccgtgcccgtctggtgctggaagtggttgacgccgtgagtcaagagtggagcgccgagcgcattggcatccgcgtgtcgccgattggcagcttccaaaatgtggataatggcccgaacgaagaagaagacgcgctgtatctgattagcgagctggcgaaacgcggtatcgcctatctgcacatgtccgagccggactgggcgggcggcaaaccttacagtgaagctttccgtcagaaagtccgcgaccgcttcccgggggtgatcattggcgctggcgcttacacagtagaaaaagccaacgatcttatcaataaagggctgattgatgccgtggcatttggccgcgattacatcgccaacccggatctggtggctcgcctgcagaaaaaagcggcgcttaacccgcaacgcccggaatccttctacggcggcggcgcggaaggctacaccgattacccgactctgtaatccctccattgatagcggcgacgtatcgccgctatactcaacgttctgatctatcaaataaactgcataggggacattatgcgcttactccacaccatgctgcgcgttggcgacctgcaacgttctatcgacttctataccaacgtgttgggcatgaagctgctgcgcaccagcgaaaacccggagtacaagtactccctcgcctttgtcggctacggcgaagagagcgaaaccgcggtaatcgaactgacctacaactggggcgtggacagctatgagctgggcaccgcctacggccatatcgcgctgagcgtcgataacgccgccgaagcctgcgaactgatccgtcagaacgggggcaacgtcacccgtgaagccgggccggtaaaaggcggcaccaccgtcatcgccttcgtggaagatccggacggttacaaaatcgagctcattgaagagaaagatgccggcaaaggtctgggcaactaacgcttccccacgctggcatatttaatgccatggctcgcccgggcgctacggcgcccgttgttttcacccctgcctgctgcaagccgcggcaaaatttgccataatgcgcgctacttttttccagctaagagaatctgatgtccgagaacgctcaactgaatggtctgtgcgaccgtttccgcggtttttatccggtggtgatcgatgttgaaaccgcaggatttaacgccaaaaccgacgccctgctggagatcgccgccattacgttgaagatggatgagcacggctggctgatgcccgatgaaacgctgcatttccatgttgaacctttcgagggcgccaatctgcagcccgaagcgctggcttttaacgggattaacccgcatgacccgcagcgcggggccgtcagcgaatacgatgccctgcatgccatcttcaaaatggtgcgcaaagggatgaaagagagcgactgcagccgggcaatcatggtggcgcacaatgccacctttgaccacagcttcaccatgaccgccgccgaacgcgcgggacttaaacgtaaccctttccatccgtttgttaccttcgacaccgccgcgctaagcgggctggcgctgggccagacggtgctgtcgaaagcctgtattgccgcgggtatgccgttcgacggcgcgcaggctcactccgccctgtatgataccgagcagacggcgcagctgttttgcgagatcgtgaaccgctggaagcgtctgggcggctggccgctgccagtggccaccccggagtgataaaaaaagcgacttccaggaagtcgctttttcactgatggcgggaattattccgcttttggctcgtcggtatggtactttgccgccgtctctttgatcagctgctgcagttcaccgcgctggtacatttcgatgacgatatcgcagccgcccaccagttcaccgtctacccacagctgcgggaaagtcggccagttggcgtatttaggcagctcggcgcggatatccgggttctgcaggatatcaacgtaagcaaaacgttcgccacaggcggacagcgcctgaacggcctgggcagagaaaccacagcttggcagcttcggcgaccctttcatgtacaacaggatcgggttttcagcgatttggcgttggatcttttctaaagtcgagctcattgtcgtgcttccttaaacttctttctacggcagtaacttgtcattgtagcgtcctgtaggcaggacggataataacatttttttcactattcatattttatcttctgttgcgcgaagttgccttaaaaatatcattttgcggtcacaggcgggcgctcattgcgcattttctgtgcgaggcggtcaatgtctgacgcgttttcttgcaatcgttaaccaatcgacatttttgatacaaaagaatattaactttccggctttttatgctttagaatcattccggtttgtcattcatcgtcaggcatttgtacatgtctgtaattaatcaggggattgctcagtggcgcggctaaacaaaatcgcgatatcgctctgtgcattactgttcacgtctatctcattcacgccactggctcaggcgtcagggcatacgcacgcctccgcttcgccaaaagcgttgcccgcgaaaagtggctcagagcgcaagaaaaaagcaaccagtcaaaaaactaaaaccaccgctaaaaccaccagtaaaaagtcctcgcgcacccggctccctacccgcactaccgcagcaagccaaaccgcacttcatcgtcaggccgctggcgcgacgaaaaaatgcgtgctgcgtaaaggttataaaaagcagtgcgcgaaaacggtcgccgccagcgccgagccgaccctggcgctaaacagcgtcaaaagcaagtgcgtggtgcgcaagggctataaaaaacgctgtaagcccgaggccagcgaagcgaatttaacgatcgccgacgcccacaaggtccgggtgcaaaaagcgcaaagtaccgcgatgaacaaactgatgggccagttgggtaaaccctatcgctggggcggcacctcgccgcgcaccgggtttgactgcagcgggctggtctattacgcctataaggacctggtcaagatccacatcccgcgtacggccaacgaaatgtaccacctgcgcgatgcgcgtccggtggatcgtgatgaactgcagagcggcgatttagtcttcttccgcacccgcggacggggcgctgccgaccatgtcggcgtctacgtcggcaacggaaaattcattcagtcgccgcgcacaggtcgtgatattcaaatcacctccctgagcgaggattactgggttcgccattatgttggcgctcgtcgcgtcatgacgccgaaaaccattcgctgatcccggtctgccgctgcggcggcagaccgcctctcctgctccatctccatccccacccgcaagggatattgcagattgctctctttgcccggcgtatcacgacgatagcgggtcggcgacatgccaaagtgacggtgaaaggtccggcagaaagcggcttgtccctcgtatcccaggcactgagaaatactctgtatcgacgcctgcgtctgcgttaaatagattgtcgcaatcgtcatctttcgtcggctgacgtagctcgccagcgtgcagcccgttaccatggcgaattgtcgctggaagtaccagtgtgagtagccggactttttcgcaatcgcgctcaccgacagggtgtcgaaaatatgtgcttcgatccagtcaacgatcccctgcaccaccgggatcattttcgcgctcaccacctcatctgtttttgccatcgtcgtcatcctggggaaattactgctggcggccatatttgtcatacaaattaaaaaatagacaatgaattattggcatagcgacgattgcctgagcgcatatttttattaatcgtttgatattaaagttttattttttgttcagcgcattgcgtgacagcggcgaagcagagtagttaatcgccatgcgagttcgcaaatccgcagagggcatctccttatacatggttgcaacaattttggcggcttatcacccactcctgcagaaaacgattaagccttcaccacatgcaccggtgataatagcctttatcgttgtaaggcttttcactgcttgcggcaaatgttaacattctcaatacaataacacgcccgggacgcgacagcgtcgggcggtcagaacacgattcaggtgaaaacctcatcctgtcaatgtgagataaaacaaaaagttataaggagagtagcaatgtcgtttgaattacctgcattaccatatgcaaaagacgccctggcgccgcacatttccgcagaaaccctggaatatcactacggtaaacaccaccaggcgtatgtcactaacctcaacaacctgatcaaaggcactgcgttcgaaggcaaatccctcgaagagatcgtccgcacgtctgaaggcggcgtattcaacaacgcagcgcaggtctggaatcacaccttctactggaactgcctggcgcctaacgccggcggcgaaccggaaggcgaactggcggccgcaatcgccaaatctttcggcagcttcgcggattttaaagccaaatttaccgatgccgcggcgaaaaatttcggcgctggctggacctggctggtcaaaaatgccgacggcagcctggctatcgtctccaccagcaacgccggcaccccgctgaccgccgacgcgaagccgctgctgaccgttgacgtttgggaacacgcctactacatcgactaccgcaacgcccgtccaagctacctggaccacttctgggcgctggtaaactggaagtttgttgcggctaacctggcggcataaacgacaaaccgcagcggggtctccccggctgcggttttttttgcccttgcccagccgatggttactggctggcgaaagcctcttccggctgcgctcgcccgctaaaccagaccagcagcagcgccagaccagcgataatcgcgcccatcaccggcacaaacgcatagcccagtccgccagagatcaccgccccaccggcggcggcgcccagcgcattgccgaggttgaacgcgccgatattcaccgaagaagagagccccggcgcctcatgcgctacgcgcataacccgcatctgcagcggcggaaccaccgcaaaggttgctgcgccccagacaatcatgctgatggccgccccggcctgggattgcgccagcagcgggatcgccagcatgatcgccatcagcagcagcagaaagcccttcagcgtgccggagaccgaccggtcagcaaatttgccgcccagatagttgcctagcgaaaaaccgacgccaatcagcaccagcatcgcggttataaacagcgatgaagcgtgggtcagcgtattgagcactggcgaaatgtaggtatacagcgtaaacatcgccccggcgcccagcacggtggtcagcaacgcggagagcacctgcgggcgcagcaggacagaaagctcttttttgacatcaggacgttcccccgcgctgcccttcggcagggagaaccacaggctaaccatcgccagcaggcctaatcccgcagtagcaaggaaggacatccgccaaccgatggtttcgccaagccaggtggccgccggcacgccgccaatgttggcgatggtcaggcccataaacatagtggctaccgcgctggcctgcttatgctttggcacgacgctggccgccaccaccgatcccaggccgaaaaaagcgccgtggttgaggctggtaataatccgcgacagcagcagcgtggtgtaatccggcgcgatggatgacaacaggttgccgacggtgaagatccccatcagaaaaatcagcgcattgcgccgtgcgcgatgcgacaacagcagcgtcatcagcggtgcgccgaccatgacgccgatggcatacgcactgatcagcattcccgctaccggtatcgagacgtccacacctttcgcaatcaccggcagcaatcccatcggggagaactcggtggtaccgatgccaaaggcgccgatcgccagcgcaagtaaaggaaagttgattttcattcaatgactccatcagaccgtcagagaggacggcgtaacatcagaagtcaaaagcatgacatcaatcacaaaaaaacaaaagtgaacgaaatgacaaaagatttttgcagaattgataataatagcgggatatggggaggaagcggcgctcctccctcagcgaaacattagtgcagtatggcggtcaggctgaaagcgacaatcacgccgagagcaataatcgtggtgatcagcgaaaactttaaattggtatccatcatttttccctcttgttatccccacaccaaaagtgagcttgctcatttttgcacaaaaaatcgcaaaaatcttccgggatttagggcgatgcacatttttgctcttccactttgccccaagatcggacaaaatcccacgctaatttaaaagcgtatcggccattgaccccttcctgtcgttctgtgtcgttttcccgacgtgatgcaatgttgaaaattgtattcagggtgtgtgtaggcaaacgtttacgtatcgatgatcaggcgatcaggtcaaggcatggagtgagatgtaatggcaactattaaagatgtagcgaaacgcgcaaacgtttccactacaactgtgtcacatgtaattaacaaaacccgtttcgttgccgaagagacgcgtaatgcggtatgggcggcgatcaaagagctgcactactcgccgagcgccgtggcgcgcagcctgaaagtcaatcacaccaaatcgattggcctgctggcgaccagtagcgaagccgcctatttcgctgaaattattgagtccgttgaaaagagctgcttccagaagggctatactctgatcctcggtaacgcgtggaacgatctggaaaaacagcgcgcctatctgtcgatgatggcgcaaaagcgcgtagacggtctgctggtgatgtgttccgagtatccggattcggtattgagcatgctggaagagtaccgccatatcccgatggtggtgatggactggggcgaggcgaaagccgacttcaccgatgcggtgatcgataacgccttccagggcggctatatcgccggacgctacctgattgaacgcggccatcgcgaaatcggcgtgatcccgggcccgctggagcgcaacaccggcgcggggcgactggccggcttcatgcaggcgatgaaagaggcgcatatcagcgtgccggaaaactggattgtgcagggcgacttcgagccggagtccggctaccgcgcaatgcagcagatcctaaaccagcagcaccgcccgacggcggtcttctgcggcggcgatatcatggcgatgggcgctatctgcgcggcggatgaaatgggactgcgggtgccgcaggacatttcgctgatcggttatgataatgtgcgcaacgcccgctatttcagcccggcgttaaccaccattcatcagccgaaagattccctgggcgaggccgcatttaacatgctgttggatcgtatcgtcaacaagcgtgaagagtcgcagtctatcgaagtgcaccctcgtctggttgagcgccgctcggtagcggatggcccgtttgtcgattatcgtcgttaaggcatctggcgggcgcggatctctccggcgcccgcagccactcccgattcagcgtgtcgctgtcccccagatagtcaagcatccagttcagcgccggtgaggcatcgttctgctgccacgtcaggcagcaggcggcatccgggaacggattttccagcgccagcgcagtccactcgccgcgatctatccatggacgggcgaaatggctcggcaccatgccgacgcagagtcctgccgacaaacaggttgctgatgattcccagtcagggacgactaccctcttctggttatccagcaaccatgttgtccgtttaggcaacgagcgcgaggtatcctcccgcaccagcgacggccagttacgcaggacgtcgtcgctcaggggtccatccatctttgccagcggatgatcgctcgccaccacgcagtcccagctcagcatccccatatcgcggaacgcatagcgaccgccgaccggaatagatcgcgttgcgccaatcgccagctcaacgcggccgtcggccagcgcatcccatacaccattgaatacttcctgaaagacgatcagctcgacgtcgggaaaatggcgatagaaatcgacgatcatctgacgcatccgcgccggtttcacaatatcatccactgcgatcgacaactgtccgcgccagccgttcgcaatttgctgacactgctggcgggtgatctgcatttttttgataacagagcgcccttcctgtaaaaaccagaccccggcgggggtcaactccacatcacgatggcgacgctcaaataagggaacggcgagccactcttcgagctgacgcacggtatagctgaccgcggaaggcacccggtgaagctcctgcgcggccgcgctgaagctgccgttacgggcgacggcatcaaccacttccagagagtattcagaccacattttctgcctgcaaaatttttgaatgcatgtgacaaatattagcgtttcacaagccacaatgcactccctacactctgcggcatcgtacctgtacaccaactatgagaacgttatgtcacaacccgggaaaggatttttagtctggctggccggcctgagcgtgctgggctttctggccaccgatatgtacctgccggcgtttgccgccatgcagcaggatctcaacacctccgccgcctccattagcgccagcctgagcctgttcctcgccggcttcgcgctgggccagctgttctggggaccgctgtcggaccgctatggacgtaaaccggtgctgctgggcggcctggcgattttcgcggccggctgtctggggatgctgtgggtgcacaacgccaccctgatgctggcgctgcgctttctgcaggcgattggcgtctgtgccgcggccgttacctggcaggcgatggtcgccgattactatcctgcccagcgcacgaaccgcatcttcgccaccattatgccgctggtaggactgtcgccggcgctggccccgctgctgggcagctggctgctggtgcacttcgagtggcaagccatcttcgccaccctgttcgccatcactctgctgctgatgctgcctgccctgcgcctgaaggcagccgcgaagtcagtagtagtgacgcagcaaaagatcacctttctcgcgctgctgcgctcccgggaatacagcggcaacgtcctgatctacgccgcctgttccgccagcttcttcgcctggcttaccggttcaccttttatcctgcatgaaatgggctatggcccaaccgctatcggcctgagctatattccgcagaccatcgcctttctggtgggaggctatggctgtcgcgcgctgctgcagaaatggtccggtcaacagatgctgccgtggctgctggtgatttttgccgtcagcgtagccgccacctggctggtgggcctgcaaacccatgcctcgctggtggcgttaatgatcccgttctgcatgatggcggtggtcaacggcgggatctaccccatcgtggttgctcaggcgttgaagccttttccgcaggcgaccggccgcgcggcggcgctgcaaaataccctgcagcttggcctgtgcttcctgaccagtctgctggtatccgcgctgatcgccacgccgctgctgactaccaccagcgtaatgctggtttcgattggcttagccggaataggctatcgcctgcagcagacgccggagctgacaccccactcttcccacgcgtaatgcccgtcgccagggcccggaccagtcgttagcatgctaagaaatttttattgaaagccagtacttagcgtcctatactggatccgggttcacataaatagaaaatagttacagattaacggatgcaggatgcctccgtttcaccatggaaggcctttcggcaagggttatctcccttcctctgtttacgtcggatagcgacttcacggattatccgtgagatttctcacaaagccaaaaaagcgtctacgctgttttaaggttctgatcacttgggcgtgatggagaagctatgagttcatcgtgtatagaagaagtaagtgtaccaaatgatgactggtaccggattgcagctgaattattaggccgtgcgggaattgaaatcaatggctccgcgccgtccgacctgcgggttaaaaatcctctcttttttaaacgggttttgcaggaaggttcgctgggtttaggcgaaagctatatggacggctggtgggaatgcgagcgtctggatatattcttccacaaggtgttacgcgccgggttggaaaagcagctcccacaccatttcaaagacacactccgcatcgcaggcgctcgtctgtttaatctacaaagtaaaaaacgtgcctggattgtcggtaaagagcactacgacctcggcaacgatctcttcagccggatgcttgatccctatatgcagtattcctgcggttactggaaagaggcgcagagcctcgaggccgcccagcaggctaagctggatctcatctgccgcaaactggagctggagccaggcatgcgggtactggatattggctgtggatggggcggtctcgccgaatatatggcgcgaaattatcaggtcagcgtcgtgggtgtaaccatctccgccgagcaacaaaaaatggcccaggcgcgctgcgccgatctcgatgtagagattcgtctccaggattatcgcgatctgcacgacagctttgaccgcatcgtctccgttggcatgtttgagcacgtggggccgaaaaattacgctacctactttgaggttgccgaccgtaatttgaaacccaacggccgctttttactgcataccattggttccaaggtcaccgaccataacgttgacccgtggatcgataaatatatcttcccgaacggctgcctgccttccgtgcgtcacattgccgaagccagcgaaaagcattttgtgatggaagactggcacaacttcggcgccgattatgacacgaccctgatggcctggtatgagcgtttcctcgccagctggccggaaattgccgataactattctgagcgtttcaaacgcatgtttacctattatctgaacgcctgcgccggcgccttccgcgcccgcgacattcagctctggcaggtggtgttctcgcgcggtattgaacatggactgcgcgtcgcccgttaaataacactcccccgcttatcggcggggattttttttcaggcttcattgaccttagccgccatctctttcgcggccagcacgcgttcgaccgtatcgacaaccgcctgggtctgcggatcaatctcaatattgacgcgatcgcccagttttttcgctcccagggtggtccgctgcagcgtctccggaataagatgcacgcagaaacgggtcgccgtcacctcacccaccgtcagactaatgccgtcaataccgatgaatcctttatagaggatgtatttcatcagcgttggatcctgcactttaaaccagatctgacggttattttcggaagtcagaatcttcacgatttccgcggtggtcataatgtggccggacattaaatgcccgccgatttcatcactaaatttcgccgctcgctcgacgttcacttcatcgccgacctgaatatcgccaagattggtaatccgcagcgtctctttcatcagatcgaagctgatgcgcgcgccgttgatttcggtcaccgtcaggcagcagccgttgttggctaccgaggcgccggtttccagcccctccagcatatgtgccggtaactcaaccacgtgagtgcgaaaattgggtttatcatcaatggagaccactttcgcggttccctgaacaataccagtaaacatgtttggctcctgttgaaaatcatgacggtatcattaccgctttcgctatcgggaacaataacaggagggcaaagcggttgccagcgcgcttcgtgcctcgactcttttttcactggcttaatagccaatcctcgctacaatagactggaaattcctcatttttatccccttgctgccagttacggcggcttttttagtctcaaaataacaacaattcgaaggtgttcacgtgcagaagtatttcgttgaagcgcgtcagttattagctctggctatacccgtcatccttgcgcaggtagcgcagacggcgatgggttttgtcgataccgtgatggcaggtggctacagcgccacggatatggccgccgtggccatcgggacctccatctggctgccggcgatcctcttcggccacggccttctgctggcgctgaccccggtggtggcgcagcttaacggatccgggcggcgagagcgtatcgcgccgcaggtgcgtcagggcttctggctggccggctttgtctcggtgctgatcatggtcgtgctgtggaacgccggatacatcatcagctccatgcataacatcgatccgctgttggcagagaaggcggttggctacctgcgcgcgctgctgtggggcgctccgggctatctgttcttccaggtcgcccgtaaccagtgtgaagggctggcaaaaaccaagcccgggatggtcatgggctttattggattactggtcaacattccggtgaactatatttttatctatggtcatttcggcatgcccgagctgggcggcgtcggctgcggtgtggcgacggcctccgtttactgggtgatgttcgccagcatgctgtggtgggtgcgccgggcgcgtacgatgcgcgatatccgctgcgccgagcgcttcagcggccctgattttgccgtcctgttacggctggtgcagctggggctgcccattgctctggcgctgttctttgaagtcactctgtttgccgtcgtcgcgctgctggtctccccgctcgggatcattgacgtcgctggtcaccagatcgcgcttaatttcagctcgctgatgttcgttctgccgctgtcgctggcggcggcggtcaccattcgcgtcggcttccgccttggccagggctcaacgatcgatgcccaggtttcggcccgcaccggcgtgggcgtggggatctgcctggcagtatttaccgctatctttaccgtcctgatgcgtaagcagattgcgctgctgtataacgataatcccgaagtggtgacgctggcctcgcacctgatgctgctggcagctatctatcagatctccgactctattcaggtgatcggcagcggcattctgcgcggctataaagatacgcggtctatctttttcattacctttaccgcgtactgggtgctgggtttgccgagcggctatctgctggcgctgaccgatatgattgtgccccgcatgggacctgccggtttctggtgcggatttatcatcggtctgacctccgccgccatcatgatgatgctgcggatgcgttttctgcagcgccagccttccagcatcatcttacagcgcgctgcgcgctaacttgtctaagcccgccgctccggcgggctttttcgttcttcgctataacggcgcgttgtacattccgttactccctgacaccaaagactcactgatagcctcccggcaggcgcttatagtgttgccaacagccccgcagtggggttactcaagaaaccaagtcgaggatttcagaatgaaaaaagtattagctctggtcgttgccgctgctatgggtctgtcatcagttgctttcgctgccgatgcggcaagcaccaccccgagtgcagcagccagccatactaccgttcaccataagaaacatcacaaagcggccgcgaaaccggcagccgagcagaaagcgcaggcggcgaagaaacaccacaaagccgctgcaaaaccggctgctgagcaaaaagcccaggcggcgaagaaacaccataaagccgctgctaaaccggcagtagcgcagaaagcgcaggcggcgaagaaacaccacaaaaccgctgcgaaaccggcagtcgcgcagaaagcgcaggctgcaaagaaacatcataaagcggcacaccacgcagctaaaccggcggttaaaccggcggcataatggtcagggcgttaaggtgataaaccggcgctgaacagcgccggtttttttttcaggaggacatcatgctgcaacgctatcgcttcgaattgctgctgttactgctcatcgtctgcgcgctgtttaccctgcgcttgatgtttaaatagctggctgctgaacccatttacgggccggcggcgtatagtcgcgaaaaccggcgataatctcgtctgccgaggtagcgaacggcagcatttccgcgtagcgcgggtgcataaacccttcctgtaccatgttatcgaccatcgcctgaagcggatcgtaataacccttaatattcaggaacgcgcacggtttctcatggatccccagctgcgcccaggtccattgttcgaaaatctcctcgagcgtccccgccccgcccggcagggcaataaagccatccgccagcgccgccattttggttttccgctcgtgcatatcctcgaccacatgcagctccgtcaagccgcggtgggcaatttcccgctccaccaggccgcgcggcatcacgccgatcaccacgccaccggcctccagcgccgcatcggcgaccgcccccatcagaccaactttgccgccgccatagacaagcgccaacccctgctgcgccagcgtacgtccaaccagacgggcggtttcgaggtacagcggatgttcgccagctgaagaaccgcaaaaaataccaatcgatttcatcttcgttatgactccttctcttctggtggccgataatttaacacatcggcaacccttccgcgcaggtttggactggctgaaaaataagagccgtgatgctcgctggcgaagaaatatccttgtggttcagtaaaatatatccggaatgagtaaaagttccgcaatcgcatgcaatgtgcaagaaaagtgacgtttacctcttgccacatcccctccctgccgctaatatgcgtccccgttgtcaccacaacattgcgttcgtagctcagttggttagagcaccaccttgacatggtgggggtcgttggttcgagtccaatcgaacgcaccataatgcgtttatagctcagttggttagagcaccaccttgacatggtgggggtcgttggttcgagtccaattaaacgcaccataatgcgtctgtagctcagttggttagagcaccaccttgacatggtgggggtcgatggttcgagtccattcagacgcaccaatcatttttccttctgtaattcctgaattttatcacctgctccccgttggtattgctgacttaaaatgttgtgtattggcaaagcgttttccttgcatagtccatactagtccacatgagtgctaaggaagccaacccttttaatgagcatcaaaaatcgatcaacagaccacgccgtttaatttcttaatgataataattccattcatcataaatatatgcatatgcaaatcgatatatcagataccccaccaggaatcccacaactgaaagtaaaccccagagaaatttatattcatttactgagaaaaaaaagaaccagccagccagcgcgatacctgaagcacctaatcccatcccagcccctctgataacacgggaaagcaggawgagtaatgttcgttttatattcatagtccaccaaagaaatattcacatattttgttaaattctgctggattcttatcactgaccatacacgctgtttcgaaaggttttacaatatcctcaacaagaaaatacagaagatccagatctcccagattttgcagtttatcatgcagtaccggatttctgcgcttcagatatcgggacgtgtatattgctctggatgtttcagctccaacggataataataatccggcaagacttcctgcaaaaaaagcggacactcctcttgaggcgttcccctcttcctcatcccgctccgcgtcaggtgctgcggcttcggtcctgccgccatatgggttaacagttgctgattcagcaggctgtcgatattgcgccctccggagaacaaccatccggtagcgtgactgccccggcggttgctttaccaaactggttgcatcgtttatcagcctgttcctcatcgcttcactccatcttttctggcgttaaaattcatcattacgtcctccattcgttacccttcgccaccccacccactggccgcgctatcgcacccgcctgctttcgcgaacgctaccgcccgtcgctgtctccctacaggaacccaaagcgcactgggtaaggcagaacggtgatcttttatttaacgcccggaataacagtcgctcagcaataaatgtccaaggaaatcccgttcgtatccacatcctgccggagtaagtccagttttaattcagtggcatctcggttcagctcgggagtgactgcgtaatactgacaaagacgataaacagaataaaacaaataaactgataatattttgtcatgcgagagaaggaagctgtctggacgcagggcagaagcggtggcttcgcaacaacaatattccatactgataactattccctggtgtaaaaaagcgagcgcgcggtataacagggaggaaaccatgggcggcgctaaatgtctcccggccagctctgacttaacctgccgcaatctccgtctgcagccagcgctcaaacatctgcagcgctggctccccctccccgccgccgggtttgatcaagcagaagcgcttagccagcgtcggggagcccggccacggggcaaccagcgttccggcgctcagctcgctttccacatacatcttcggcaccagggccactccctgctgacttagtaccgcggcgatcgccatctcatgcagatcgtagcgcggcccctgggcggggttatccagcgccagaccgcactcgcgggcatagtgcagccaggcgtccgggttttgccgccggtgaatgcgcgttagccggttaagcagccccggaagatcgtcatccgtcagcagcgcagcatggcagaccggcagcaaatactccgcaaataaaaacgtcacctccattccggtccacgccgggtgttcaaaatggatggcggcatcaaatccgcttcccggcagaatgaagggatcgctgcgggcggcgatattgaccacgatatgcggatgctgcgccgcaaagcgcccgagccggggaattaaccagcggctggcgaaggtggggagcacggcgatctccaggctgcggccatcgacgggcatcccgctgacgtcatgggtgtcccgttccaggcgagcgaggatctcgcggacctgacgagcatagcgggcgcctgccggattgagccgcacccggctccccgtcctgtcaaagagtttactgtcgaggagcgcttccagacgggcaatctgccggctgatggccccttccgttaacgcgagctcagccgccgcgcgggcaaagttgccgtgacgagccgcggcctcaaaagccagtagcgcagcgctgctggggattttacgacgcatagccaatgctccttgtgcaggctcaccgaaagtcagtgacagaatatcactacgccttgaattaacatcgtttttcagcgccatttttagccgataggatgatgaaaactcactaaagcgccttgtgcgcacatcatctgttcatcgaggtcactatgctctatgtcgtcgaatgcgcctacaccgatccccaaagcgaagcggcgtggaataccttttacaatcaggaaaaactaccggcgctggtctctgtgcccggtttctacgcctcccagcgcttccgcgctctcagcgagggctgcccctgctacctggcgctgcacgatatccacgatgctaccgtcatcgacagcgacgcctaccgccgcaacggcggcggccattttgcccgctggcaatcggcgatcgccgactggcatcgccacctctatctaacgaataatacgctgcgggaggttgccccggatgaagtgctgctgctgggcgataccgcggaggacttgcccgtcgctgcgccgatacacctgcagccaggcggcctggcgaccgaacaaacccggtatgccgccatcctcccacgggacaacctgcatcacctggccacgactgccgccgtctttatctatcagcccatcaccgcccggttacgcaacccggcgcagcgcgcgtgaggtcgccatgtcacctgctcccttttatacgttgaccgctggcgacctgacggtgactgccgtgagtgatggtctgatgtcagcgccgctgtccttactctcgggtatctcgcgggaggaggcggagcatctgcagcggcattcaggattagcctcgccggagaccattgcgattggcgcctatctgatccgcggtcgcgggaatacggtgctggtggataccggcaccggcggagccaatggcgttggcggcgaacttatcgccaatctggcgcggctcggcgttggtcctgaggagatcgacgccatccttctcacccacgcccatccggaccatatcggcggcctgctgtccgccgctggtacgccagcgtatcccaacgccacggtgttcctgcctacgcgggaaagcgcttactggctggcaacatccacgttcgacaacgccagcgatcgcggtcggcgcaacgtgctgcttgttcgccgtgtactggcgaactgcgcggcgcaaatcagcggggttgatgatgaggaggtgatcgccgggatccgcccgtgccctctgcccggccatacgcccgggcataccgggtatcgtctcgaagcgggcgatacctcgctgctgatctggggggatatcgtccatttcccgtccattcagtctgcgcggccagaagcctcggtcgccttcgacgtcgatcctgaacaggcccggcgtaccagggagatcctgctgcgccaggccgccagcgaacggtggttgattgccggtatgcatcttggcctgccgggattcgccagagtggagaacaccgcctcaggctattgtctgcgctcggtgtgatcgttgagcagaacaatgaccacagtaaaaccccggtcgcggcatgagcacgaccggggcgttttgtccgggaaagtggacgagccgttaaccgcggctcttccagccttttttacttttgcagctagctttggtggcgacccacgggtgacgtagctgagtcaactgaagatcctgggaggccgggctggccgaccagcgtttgttgcacagaggcttacgagttgcaatgaccataaaaacgctcctgaaaagtaatgaaccattccctgggtagttccacaagttcagaattagcgtatcaccgcgtaacggaagttatttcaatctttgttttagaatgtaaatggtcatcgccctctgaaatagcttaaattgatccaaatcaatttaagtgcatttatttttcgatgccacctatattttcaagcgcttaccttcgccagtcgcctgattaagacttttcctataccgcataatacaacagaatcaagcgatattatcagatttttattctagttatgtatggctgtgtggttatttgttttgattattctaactgataaaattcacttggtcagtcagcagcgggcaggtactctgcaccggcaagaagaggatttgtcagggagtggtggatgactaaaggctataaactacttggctataagttagcggataatattttctactgcctgcatcatcgggaaattatcacgctgcgcgggacacggacgcaagtccagctacgcagcaccatggcctgtttactggagtacctgctggcgcacggcagagaacgtctggtcagcgatgaagagttaatgattaacgtttgggaaaaaaataatctccgcccttccgcgcagcgcctatggcaggttattcagagcttaaagtctcgcttacaccaggctggcgtggagagcgcgttaatcatccgcgttaagtgcgcggggtattatattaataacgtttacgtagccgaaatttattcatacaaaccgccggggatgatgaattatataaacacttcgcctgctgatatgaataagcttctggtacgcagctaatcccctccccgcgccgtttacatcgccagcaacagggtttattcgttgaatattttaattcacagcaataatatttattttaatatcggtatcgcccagtgttttcgggatattcagaaaacagcgcccgaattaaaggttattcactccctgcccctcagccatcttccagaactgtccgggctggatgtgattattttgtcactggaaaactatcatgattacctggctgccgctgaaatcgctcagcactttcagggcctggtcattggctttacgtcagccggcaacgtaaggcgcggacgcgcctttttcgcggataccctactgtgggtcagccagcgcgaagcggtacgtgaagtgagccgccttctgcgctgcctggccgagcgccgctggccactcgtgccgcgtcaccaacgtcagagcgtttctttccgtcaacgagccccgctcaaccgcctggagatgcggatgattgatgccaccatgaagggtcagtcggttcatcaaatggccgctacgctggggattaatcgcaagcgggtctataacggcctggaaaggattaaagtgaatttccgcctggtcagtcatagccattttcatcatttcatgaccgacaggctctcttttagtcgcctgtctgccgacctccgatgcctgaccacagcagctaatgcaaccctgccgccgcgcgcagcctcgcggctggcggaaaatcattcatattatttgaaagagtttcgcaaattgttttgattttaggctccagcaatcaagcgtattctttatcacatcagggcaacaggccctttatcagacaccaaattaaggaatacgaccatgaaattcatcaaaactttcgttgctgttgctgcgctatctctgttctctgctgccagctttgctcagagcgtcagcgccactgcctccacgctggaccgcgcggaagctaaaattgccgcccaggccgcagaacagggtgcatcctataaaattaccagcgcccagtttaacaaccgtgttcatatgacggctgaactgagcaaataaacccttgcccctaaacgtttcctaaagcgccgcctggacggcgctttagtttttcccccttcctgacctttcccggcaggtccatgcggcattcgccggatcccggacaatactgactctcagcacaaaaagagcctgatagcaataaatacccgattggctggattatctgcggcttgtcggcgtaaagcggagaggtctgtcgccgcgaatcagtcggaggccttccgctgtctgcaaagcggcgcccattttggcaaaatttgcgtggcgtggtgagggtttgcagggcctccgtgccctggaaagactttattcgaaaaagacgtccggattttccgacagcgaaacaaaggatttcgtgtttttatccagcgcctgaatatcgccggtttcgatgtcgtagaaccagccatgcaggcgcagggtatggtcgcgcagaccaaccgccaccgaaggatgggtcttgatgttattcagttgggcgatgacgttttcctgcaccatgccattgaccttatcggtttcgctagcccaggttttcttttccaccaccgctttcgcggcatcggcatagcgtagccagtgagacaccgccggcatcggctcaaggcactgacaggtggcgatcgctttcatcgcgccgcagttggaatggccgcagatcacgatatccgtcacgcccagcgcaaccactgcatattcgatggtcgcggaaacgccgcccggctccggcccgaaagacggcacgatattcccggcattacgaatgacaaagagctgtcccggctcctgctgggtaaccagttccggcaccagacggctgtcagaacaggagatgaaaagcgctttgggattctggctggaggccaggctgcggaagagttctttacgctgggggaagatctctttctggaagttgaggaagccctcaatgatatgttgcatagcagtgtctcttctctgtagttattacggtatgacaaagatcacagttattcagtttaccatcgatgacaagaatgggaatcgttattcaaacagttgcgcagaaaacgcgcgccgccaacgcctgcttctccccgtctaatacacacctttttgacgtgctttcctgaaccattttgctactctgtctgctccaaccgtccacacgttaccgaccgcctgcctgcggcggacataacaggagtcgctatgttcctatccagcctgatggccattgccgcggtgctgatcatgggcgtgatcagtcccggcccaagctttatttttgtcgcgcgcaatgccgtcgctcgctcgcgtctgcacggtatggtgaccgccctcggtactggcgccggtgcggccattttctccattatggcgatgctgggcctgcagaaggtgctcaccgcggtgccggagctgtttattggtttgaaggtggcgggcgggctctatctgctgtggctgggctataaaatttttcgcgggtcggcgcagccgatggacttttccgccagcgggatggccggcaaccgctctttgctgaagaccttccgcgacgggctgtatactcagctcagcaatcccaaaactgcgctggtgttcgcctcaatttttaccgccctgctgccggcgcagatccccaccgccttctattacatcgtgccgctgatgagctttctgatcgacgtcagctggtattcgctggtggcgctggtgctgtctgctgaccgcccgcggcgcgtctacctgcggctgaagcggcggatcgacatcgccaccgcgacggtgctgggggcgctgggcctgcggcttatcgccacctccctcacccgctagcgggttacacggtatagatgcgaatatcgtgctgctgaaaggcaacgcgatattcgcgactgatattctcttccaccaccagcacatcgatatcgctgctggcggccaccacaaaccgcgctgcggccggaattttatccgaagtcagaccaacaataatttcgctgcactgtttaatgaccgctttcttgaactcgcagtcggcatagtcaaagccggtcaggcccgactctggcgccatcgcgcagccgccgataaacccctggtcgaataacatgccctgcacctgagccaccgccgcggcgccgacgcaaccgccgctcgcgcgctgtacctggccgccaagcatcaccacgtcatacagcggttttttcaccagtaccgcggcgatctccggcgagttcgttaccaccgtcagcgccagctcggtgggcagcgcctcggccatcgccagattggtggtcccggtatcaatgaaaatagtgccgccgggcttcaccagccgggcacactgttgcgcgatcctgagctttatcgcgcggtttttatctttccgctcactgtaatcccccgcttccggcagactcagcaccgccccgccatacacctttttacagaatccctcgcggctgagctcatgcagatcgcggcggatggtatgctccgacacctgaagacgcgccgccagctccgcgcacaccactctgccgttttcctgcaggatctggcaaatcagcgcttgtcgctgttgagggaaagcagcataatcgagcataacacaatccttaaatgatcaaaaccgagcagtagcaagcatgatcgtctgccctgctctggttgtcaacgttcctgcccggaggtttaccatgaaaattgcccatttcgccctgtggacccaacagctcgacgtccaggcccgcttctgggtggacttctttgccgccagcatcaatgaaaaataccttagccagaccaaccccggctttgcctcctattttgttactatcgacgacgaggtggtgatagagttgatgagcaagcctggcctgcagcaggccagcgcggataataaccataccggctgggcgcatctggccctctcggtgggcggggcggaacaggtcgatgccatcgcccaacgcgccggggccgccggaatactgatttcgccgccgcgcaccaccggcgacggctattatgaggcggtgatcgccgatcccgatggcaacctgatcgaaatcgtcgcatagtcagcagaacgccagtattcaggaggcagccatggcacattaccggattatcgacaccgcatcctggccccgccgggaccatttcactttttaccgccaattcgccaaccccagctttaatctctgcgtgccgatagcggcgcagcgcctgtacgaatgtgcgaaggaccgtcgggtctcgttttttcagctcgcgctctatgccctgctgcgcgcggccaacggggtaccgcagctacgccagcgagtgcggaacgatgaggtgattgaatatgacagtctggcagtaatgacgccggtgatgaccgtcggagagggattccgtcaggtgtggtgcgacaatgctcccgagttcaccgccttcagcgccgcggccacgccgaagattgtcgcggcaagagagacatccccggcgccgctcatcgtcgatggcgagcattttatctgcgccagctgtctgccatggctccacttcacctcgatgacccatgcggaatatgccgtcggcgcggcggtccccgcgctcacctggggaaaattgcagaatggcgttatcccggtggccgggcggtttaaccatgccttcgtcgatggtctccacgccagccgcttttatgcccttgtcgaagagggatttaatgaccccgagcggctctggttgccgctaaccgaaaccgcaccctccctgcttcccccagcggcgagggagcgttaacgtctgcccggaactgaccgccagggaaccttactccctgcacggcggtcggtacggggccactatcatcgttccctttcagccggcgaataccgcgcaggtgtgacgcctgttcagaacctcgcgattgaaaagctgggtcgcagacagcatgctgaccaaccatcatcagacagcggaaaccactgcttcatagccataaaatgggattatattgccgatcctttgctaaggataattagttataaatcatagcgtttcagtgttagacagggcgaagtgcgcctcttatctttcgtcatgaattgtaaataaccacgcaatcatttgatgaggtagcacttttgtccagattacaacaaggattaaaaaccagacaaacccgcttcgccctggcgctaaaagtggccctgctcggcggcgtggtagcattttcttctgttgcccatgcggaagtgatcctgaaagaaggcatcaccccggccactgacgccagccagatcccggccagcgccaaactgcgcacagacacggtggtggccgggatctccgagccgcaggggatctttaacccctactttttcgtcaacggctgggatgagaacgtgactaacgtcattttttcacgcctgatcgactgggacagccagggcaagctggtcccgggactggcggagagctggacggtcagcccggataacaaagtctataccatcaaattgcgccctggtctcacctttagcgacggctcaccgctgacggcggaagatgtcgcctttaccctgacggtcctgctcgaccccagctatgatggcgataccgacatcaccctggccaatatcgccggcggggcggactacaaagccggcaaggctgacagcgtcagcggcctgaaggtcatcgacccgctcaccctgcaggtgaccaccacgcagccaggcgccaccacgctggccaaaattggcgggcctgtactgtcgaaagcctggtacggcaaagggtatcagcgggggaatctcgactatctgcgctcactgcacggcaagccgctgggcaacggcccttacgtgtacgacaaatatattcccggtcaggaaatacgcttccatgccaatagccatttttaccgtgggacgccgccaacgccgcgctttatctatcgcgtgaccaatccgtccaccaacttccagctgttccagaccggggagaccgactacgacgcctttacctcgcgccccgacgatattgagcaactgaagatgctcggcttcgccaatattaatctttacggctccagcgactacagccaggtggaattcaacgtgcatcgcccggcgctacaggataagcgggtgcgccaggcgctgatttacggcctggataggcagaagctgatcgacgtggtctatcagggatacggcaaagtcgccatcgaaccgatcgcgccgatctcctgggcctttaacgctgaaggcgtcgacccttacccttacgatccggcccaggccaaaaagctgctggatgaggccggctggaaaccaggagccgacggtatccgcgccaaagacggccagcgcctggagctgaccctgctggtgagcaagaaggtgctcaacgatgcgctgatccccatcgccaaggagaactggcggcagattggcgtgctgctgaagccgcaggtggtggatttcaacgccctgatggcgcagcgcaaagccggaaattacgatttggcctcgttcagcaccagcaccctcaacgacccgcacgacggggtatgggatttctacagcagcgaagctaaagagtccggctaccataacgcggaagtcgataagctgattaacgccggcaacgcggtgctcgacatcgaacagcgcaagccgatctaccaccagctgtataaagtgctggccgacgatccgccggtgatcctgctcggctatcgcgagatcctttccgccagcagcgcccgcgtcagcggctttaagccggatatctacaacggcctgaccggcagcctgccggatgtaaaaatcgtcaaataaatccctggccgccgggttaaccggcggctgatgtgagaccgtcatgagaaatttcatcctgaggcgcctgctgcaaacgctgccgatgctgctgctggcctccttcattatttttttgctgtttgccaaaacccccggcgactttatcgatggcaatatcaccctgaccgctgcccgcgccgcggagctgaaggcgatctacggcctcgaccagccgctattgacccgctacctccactggctgggacagttgctgcgcggtgatttaggcttttcgctgcagtatcagatcccggtcagccagttgctcaaccagtacatctggaactcttttctgctggccagcgtcgcgctggtcttttactggggcatcggcctggcggtgggcgtggtttctgccctgcgccctggctcctggtttgatcatctggtgagcgtcgcggtgtttgccgccatgtcgttccccacctttttcctctgcctgctgctgattaaatggttcgccgtcgatctccactggctgccggtaggcgggatgaccaataccggcagcgacgagagcggctggcagtatgtgctgcaggtggctgcccatctggcgctgccggtgctggcgctggtgatgctgcaggcgggcagcctgacgcgctatgtgcgcgccagtatgctcgacgtggtgaaaatggattttatccgtaccgcccgcgccaaggggttgcaggagcgcacggtgatcctcaaacatgccctgcgcaacgccctgctgccgattatcaccctgctgggcttcgagctgccggggctgttctccggggcgatcattaccgaaaaggtattcaactggccgggggcgggccacattcatatcgactcgctggccgcccgcgactatccggtactgatggggtttaccctgtttctggcggtgctgacgatcgtcgggaatctgctcgccgacgtgctgtacgcctgggccgatccgcgtattcgggtgaggtcataatgatcctgtcttacttagcttcccgtcgccgccagcggcaggcggctatcccggcgctggcgcacattactccctctccctggcgccaggggtggcgacagctgcgccgtaaccggctggccatgttctgcctgctcctgctggcggtgatggcggtgtggtgcgtgctggggcccgtctggtcgccgtggagtgatgatgccaccgacgccctgagcatcaaccagccgcccggggcggaacactggctggggaccgatttcctcggtcgcgatgtctacacccgcctgctgctggccgggcgcatctcgctgattatcggcctgctgaccatggtgatgtcggtgtgcctcggctacctgctcggcgccctctcgggttacgtcggcgggttaaccgacaaactgatcatgcgcgtggccgacctggtgatgactatccccgggttaccgctattgatcgtcgccggggcgatgctttctgagctcgatttttcgccggactcgcgcatttatatggtggtggtgatgctcagcctgctggagtggccccgactggcgcggctggtgcgcgggcaatgtctctccctgcgcgaacgcgattttatgctggccacccaggtgctgggcctgtcggcgcgtcgccggctgtttggccacctgctgccgaataccattccgattctggtggtgatggcgaccatggccgtcgccaacgccattctcagtgaatccgcgctgagctatctcggcctcggcgtggtgccgccgacgccgtcgtggggcaatatgatggatgccgctaacagcctgatcgatttccagcgccgcccctggctgtggatgccgccgggcatcgccatctttatcaccgtgatcgccatcaacgtgctgggcgatggcctgcgcgatgccatggatcccaatatgaaaccgaggctgaaatgaccacgccgttagtctcctttaatcatctctccgtctctttcgccggcgaacgctctcgcgtgcgcgcggtgcaggaggtctctttcaccattcaggccgggcaaaccgttggcgtggtgggtgaatccggctgcggcaaaagcgtcactgccatggcgctgatgggcctcctgccgccgcagacggcgcgcatcgacggcggcgagatccgcttcgcggaccgcgatctgctgcggctgaaagccagacagatggccgatctgcgcggtcaccagctggcaatgatttttcaggaaccgatgtcggccctcaacccggtgttgaccatcggggagcagctgtgcgaaccgccgatccgccacctcagcgccacgccgaaagccgcctggcatcaggccatccagctgttaagcgaggtcggcctggcgcgcggggacagcctgatgacccgctatcctcaccagctttccggcggcatgctgcagcgggtgatgatcgccatggcgctgagctgtcggcccaaactgctgatcgccgacgaacccaccaccgctctcgacgtgaccgtgcaggcgcagatcctacgcctgctgcgggatcgggcccgggccagccagatggcgatgatgctgattacccacgatctgggggtgatcgcgcagatggccgagcaggtggtggtgatgtatgccggacgaattgtggaacaaggcgccaccgcggaagtgctacggcatcctcagcatccctacacgcgggggctgatcgcctcccgaccggtgcccggtgagcggcgtcggcggctgtactcaattcccggccaggtgccggatctggccgccctaccggcgggctgcgcctttgccgggcgctgcgagcgggcgacggcgcgctgccgggaggcgattccgccgctgctcggcgaccgccaacgtgctgcctgcttttatagcgaatttgcggaggtgacagcatgagcgaacgctatgtcattgaagtggatggattgaaaaaatattttccgctacgcgacggcctgtttggtcagcagaccggcgagcttcgcgcggtggacggcgtcagctttaatatccgtccgggcaccatttttggcctggtgggcgagtccggcagcggtaaaaccaccgtcggccggaccctgcttggcctgtacgagaagagcgccggcagcgtgaaatttcacggtcaggagctggccgacctgaccgcgcctgccctgcgcgctatccggcccaggatgcagctggtgtttcaggacccctatagctcgctgaacccgcggctgcgtattggcgacgcgattggcgaagccatgctgcagcacaaactgtgcgcccgcaatgagctatatgaccgggtaatcgacgtgatgaagatctgcggcctggcgccggaacactatgcccgcttcccgcatcagttttccggcggccagcgtcagcggatcggtattgcccgggcgctgatcctcaacccggattttatcgtcgccgatgaacccatctcggcccttgatgtgtcgattcaggcgcagatcatcaatttgttttccgacctgcgcgacaaccgcggcgtcacgtttctgtttatctcccacgacctcggggtggtggagcatttatgtgacgatgtggcggtgatgtatctcgggcaactggtggaaagcgccagccgcgatgcgctgttcagccgccccctccatccctatacccgcgccctgatggctgcggtgccgaccctcgacccgcacagcgaaccgcaggcgctggtgcaaggcgagatcccggatccggccaatccccccgccggctgccgcttttcatcccgctgcccgctggccagcgaacgttgccgcagagagcctccggcgctgcgcgaggtggccccgggccatcgggtcgcctgtcattgggtcgcatcctgagcgcggtcaatggggttatttatttctaaacaaccgaccgattgtgcgcggcagcgccaggatttactgtccgccccgtcttgtgagacgcgcgataaatgaagcggaacatctttgtactcttttgcccaatggcttcgggcattttttctccacgcccgggagcgatcctcccggcaagatatttagcggggcgcggtcgcccgtctgtcaaaacgcagcaatggaattgctcgtccgcgtcccgctacccttttcccgccgctaattaaataagggcaaaaaaataagacaacatgagattgcctggggtatagctttatcttattttttaagcgtgtactccctgttaaggtatcaacatcatgcttaagcgtcgcactctcaaaacagcactggcggcggttatttctcttgccgtcatggccgcgccagcgtatgccaacccgggtaatggcaatggcaacggcggtggtaatcacgggaacagtggtaaccatggcaatagcggcaatcatggtaacaacggtaacagtggcgaccatggcaataaagggcaaaataaaggccagtccactgaagatcacggcaaacggaaaaactacggcaagcccgaccacgtcgacagcgatattagcttctcacgggcgcgctcccttgccgtaaactacggtctggtcggctatcaggcgctgccgccgggtatcgccaaaaatgtcgctcgcggcaaaccgctccctccggggatcgccaaaaagaccctgccggcttccatgattaacgacctgccctattatccgggctatgaatggcgggcggtcggcgatgatctggtgctggtggccctgagcaccgcgatcgtcaccgccgtgattaacggtgtgtttgactaaatcatctgcttattgaaaagcctcgcctcggcgaggcttttttgtgcctgatgccggtgagtgacggctcaccggcataaccagtatgataacggttcaaccaacccgggaccgactatggacaaagacacagtagtaacgctgttgaaatacaagcgctggattgaccttgccaccttacaggcgatccgcgcgattgacggaacgggacatggcgaaaagcgtcacctgaccatcaggctgatgaaccatatccatgtcgttgatatgattttccgggcgaacctgcgcggcaggccgcacggctacaccgcgctgaatacccctgagacgccaaccgttgatgagctggaaacggccatgaccgcctgtacggacgaatacattcagtacgtcagcgccatgacccccgccgatttccacgaacgtatcgccttcaaatttgtcgacggcggcgacggcaatatgaccgcgatggagatgctgaaccacatgctctttcacggcgcctatcaccgcggcgcggtgggctggatgattggcgaatgcggcggcgtgccgccgaaagaggtgctgaccgttttcctgcgcgaccatcattcctgaccgagcgaaaccattcgccgtcgattacgcggagaatcagcaggagctctgcctgatgtcgagtatgggttttctggtacagggcgctaaggtgggttccgatcgtggcgatagatacgcccagatgtaaggctatcaagggggttcaggatccactgtcgcgggtttggatagcgccccccttccggcataacgtcagccagatcatcagggcgcacagcagggtgacgaccgccagcccgctaaacagtagcgtataagcagagtcatagctctcgcgcagcacccggagggaaaaatcaggcaaaagcgcagccgcctgcggcatattgccggcccccagccagcctgcggcgcggtcaatcacctcaggcgcatacccgtgaacgcgactctgcagggtcagggtattgcttgccgttaataccgcggagacgaccgccagggcgatcccctcgccagcaacgcgtacggtgttgaacaggcctgccgccataccggctttggcgaccggcacagcggatatcgccaggccatccatcagtccccagggaagcgccgcccccgccccacagaggatcagcgccagcaccagctgcgggaggtggttactgtgaaaagcgttccccagcaacagcaacccgacggaggccatcatcagtcccgccgtggacacgtgccccggtgaaaaccagcgggtgagcagggctgcaacggatgggaaaaccagcatcggcgtggtcagcgccatcagatacagcgcgctctgcgactcactcatcccctctccgcccataaaatgcaggggaacaataatcagcaggacaacgtagcaacagcaggtggcgacaggcagcaacagtacgccgacaaaacgcggatgacgcagcagggagagttccagcaccgggttgttcaccctccggcagcgcacgacaaacgccacgaacagcccccccgacgcgatgagcaaggccagcgtggtcagggataaaaaaccgcgggccggaatgaccatgagcgatgcagtaaacagcatcagggccagcgtaaacaggagtaagccgaggttgtcgggtgtccgcggctcgcttttttctgccgcgggcagatacgccagaccgataagcagaactatcgccgagagcagcgcaaacagggcgtatacgccgcgccaacccaccgcgtcggtcatgaagccgatcagcagcgggccaaacgccaggccggcgccgaacaccgtgcccaggatactgaatgcccgggtccgctgagcgccatcatacagctgggccagcgccgcactgccgctggctaaaatcatcgccgcggccaggccctgcagagccctcaacacgcctgacaggaagagattgtgcgtcaggcaaaacagcaggctgctcaggcaaaacagcgcggcgccggcgataaaaatacgttttctgtcgatggcatccgccgtcacccctgcggccagcaaaaagctgccgaaggtcaacataaagccattggtcagccacgacagcgcagcgggagagccgcccagcgactgctgtatcgcgggggtggtcatgacgccgccggtaaaacttaacggcagcagcaaggccgccataaagacagaaagcgcggccagggcgctggcgtatcgggaaggtgttctggcggtgagtaacatcgggcggccctcatcagtcggcaaggaatgaataaactgtcgccatcctattgcggatgttattgccgataaatagactgaaaatatcttcttaagagacataaggtttataatcaatggacagcctcacctcgctgacgtcctttgtccgcaccgccgaaacgctaagctttgttcaggccgccaggctgctgggcatatctgcctcggcggtgggtaagaatgtcgcccggcttgagcataaactgggggtccgactgttcaaccgcagcaccagaaacgtcagcctgacggcggagggggccgcatttctgacgcgctgccagagtatcctggagcagatccaggaggccgagtcagagctgaccagcagtctctcacagcccaccggcaaactgaggatttcactgcccgtcattggctaccgcctgttgctccccgccctcaccgcctttacccgtctttatccgcaggttgaactggatctcgactttagtgaccggctggtcaatctgatcgatgaaggatttgatgttgctatccgtagcggtgaattagcggactcccgcttgatcgccagaaagctgggaggctttcgttttgtgctctgtgccagcccggcctatctggcggaatacggcgcccccgactcgccagcggaattggcggcgcacaagtgcatttttttccgcttccccgcgacggggctgatccagccctgggaactgcgcgatatgcggctgacgggagatttcagggccacggccgtgatgacggtcaataacattgaggccgccattcgcttaagcgcggcggggatgggcatcgcttatgtgcctgattttgtcgtgcgcgaggccatggatgagggacaactgcaggaggtgttgcccggctgttgcgtcaaggatgggcatttctccgtcctgtggcccgccagccgctacctgtcaccgagaatacgctgttttatcgattttatggctgcggcagagatacccttgtcacccgcatcggcgccccctaccccttgtgtctaacaatttgtggtgattagctacccccactgaagcagagtgtgccgcccccttcccctaaggtcagaaaagtctgcaccgctgaatcttgatttgcagcacatggcccttcgctttacctttcacaccagttcatctgggtgaacggttacctgagttgaaggtccgctgcgagcgaacagcggaaattaacatacctttgaaagtggccaaatttagctatccactacacagaataagaaaaggcatcttctagcataaatgcccgtaaccgataaggtaccgggctattacgaaaccttatttctaagccatcgtgccagcccggtgtccagtatgagttctgcaagcctcgtgggcccaatcatagtgacgccttcagcacggagatcctcactcaatgtcccatgatgccagacaaagaacatccgatcatagctgtcactggtttggaaccgtgacagatagtcagagaatacagactgctcagcaacagacttcacttgcacaaatgcccgttctccggtggtgggcagttcaagctcaatatcgacagtcttctgtgtcctgccaaggctcccggttcttctccatccgctggcggagaaaatcagatctacgagcaactcaaagtcctgccaggtaagcaaactacacagcctggtaatagccttcaggtactgagctttagcaatatcagcgctgatgatttccggcgattgctcatcattgattgttcgcagggcgtaatcggccaaacgcacatcgcagatggtcccccggtaattctgtgtagcgagtaaagcaccgctcaggacgctgtgggatagaaggttcccggccagactatggctgtgccatccgctcaccgtggggcgggtcctactgccatcatccagttcgatgacctctccggaaggctggcaccaatgcaataatccctggctgaacgtaatgaagagtatatcgggggtggcggtgtaaaacgtccttatctgtctgacatcactggtggcagtggactggttatttttcctttcttctaaccagactttattcacatcctcccactttccctcaaggcacatctgatggggcgttttgtggtacccaaacttaataatgccagatgtcaggcactcatgttcccattcgcctccctctcccagcttgatatatttaacagcagtcgcctggatcttttccaaaatgcaatcactccgctaaaaaaaattcctaactgaatgttcttactttatctctgaacagggtgtaaaggcgcgcatttcctttaccgggataaatcagcgtggcgccagatggtggtgacaatacgcgtcataaagagataataggacgtacagtaaacggaattcccgtaccgggtgcagttggtctgcacaggtgctttcaagacatcattgagagactgggtctggcgttcctgttgctccagctggcgctgttggtcgacgctggccagtgcctgattctgcctgtaaatatcagcactcagatgattacaatctccttttgtgatcggtttattcgtaaacgttttgacagcctgttggcaacgttgctgatattccgcgctatcgtagttccacacgtccaagtattttccgataaaactttttccggtcccagctatctggtaatccataaggtcgttatttaaataaacgtcaatggcgcccgccatgcccgccacaaaattatattgactgtcatccacttctgattttggaatggcatacgagcaaagagaaagtggcattacgcccgaagatgcttttttatttcccaaacattccaccattttcatcaaatatctccaacagttcatgaactctcatgacttcatcaagaataggttgaacattatgtctttcccccaatacttgataaattccatcatttagatagtaggctctgaagatgtgatgcggcacatctgtttcttctggtttgttcaagattagacttgggaagatatttcctacaattccaccttcaagatacatatccagtcgttcatcaaagtgctctattgcattcctaagtttcttatcatgcaaagggctgctttctgtcacatcaaaaatttgcctcagaaactcagcacggttcttatgtaaaaccttctcaccttttccaccaatcattgatggaaagaagtaccgagctatagcagcactatgattgatgaagttttgtagacagtctagaagctcatctttccgatcttgtggccctagcttcccttcactgatagcttggatgtacttagatgctctatccacggcctgtagagccgatgttgtattgaacaacatcgattggatatagaagacatggtacggaggccatattgatggctcatttttatccattttctatcctttactagattgtagtggcataccgattttagccacattagcagaagtgtggaatgtccgcttctggcacagagcagacaagctacctgagttgaaggtctgctatgagcgagaagcggaagttggcaacgccaacagctacatgactaacattgaggaattttaatcatcggggagtaggtcaaatggaccagctccccatccgctaagactaaccacagtaacaacttacgcttttgaccagacctatcggttatttatgaccgatttcgacccaaagtcgcatgtggataatttaaagactcattgtgatttgacctgacagtagctgtcaaatgagtttgagctaccacagtttattgtgctatttaagagtggctatcgatgtcgaaaagtggtcactctttctggatgcctgcaattttctattagggccgcgagaaaattatcctcatgttcatcaggaaagagcacatgcgacgataaacgttcagactccggcagttcgaaatcgattcgaatcgctccaacaagatataagcccgcaagattaagtgcgtacggacctgatcggcagattacacatgattgcctctccggtctaagtggctgtaaaccatgaagaactcgatcgtgtgcatacaccgccatttcattttgtttatgcttaaacaagtacaggatggacttcgaaccgttacttccgacgaactggtaatgatcattgccagcattgggaacaaaacgatgactcgcaaaaaacattgccactcgcaaatcactgcttaaatccaaatacggcgaaaacagtccatagtgctgcagtagagtattaagtaggtcagccagattgtaattatggcccatactcaaatccaatcgaacgcggccaaagagactcactaaaggatcatctgaatcctccatatcttgtgctgaatatatcgactcacctcgttttatgagttcgtttattcgtcgatccacttcctcgatgtcgaattgtgaatagataatcttcgaccactcatacaagttaataccattgaaatggtgaaatgatcgcggatgattctggaggagatttcgccaaatagaaggaataaaagaagtctcgccaagcccttcgataagaaagtatggatttcttattgggcgagtaatctcgtaatgcataatctgcccacggaacaatagtttttgccctagagattcttggattttgttaacctgcctcgttaattcgtcatatgattttgctgtgtttaaaaaaatatctttacagaaggtcttaccggactttgctatctgataccactcggtaaaattatttttgtgaatacgtgtggcaagatccgaactggctagaggtccgccatagtaacgatctataattatgtcaccacccatattcacataccctgacgagattagcgcttcggcttctgcagtttggatgccaaggtcagaataaatctgtcgagtcttctctaaatttggggggtaaaaattatttggccaatcaaagtcattactgtagtaattccaatagttatcataattcgccatgagtttcttattttccaatagttgactaatactaacgccaatacataaaagctttttcttctaaattaaattttagcgaaagctttcgaataagctttattatcaccaatgtagacacttgtcaaataaaactggtcgccaagttagattttttcatgtgaaggttttccgattcgtttggtggtcagttgactcaacgttatattcatacagccatagaatactgtaatacttaacgataagtgaaccgccacggataatttagacatttccttgccagctcaatcacgctagtaaggttccccccatgtagccaatttgtcagatgtcgggtcaatacctttctgaacatatgaatctgaaccgatatcttctagtaacttgttcctcaaggaaacatcaacccggccaagtaaggatatattgtcaatatgttctgaaccacacttgcagtcttcctcatgaataacacgttcccaacagccgttactatcgattagatagtgcatcccacagaagcgaccaatactcatgatacgcaaccctggatgatcgataccatattcaaatacacatacaatattttcaggcatttttactattccaacgcccttcccatatcttgtgtccataccatggtaaacaagtccatcaagttcaattgatatctcattatacttttctaatagcttgttgatttcaggaagaacaaaacaagggtcacttacaccatgatacagggcgcttccacatagaatctgaactatttgtgaagagataatggccaaaccgtccggaggcggaaggtccctagtccaaaagggtctatacattgcacttctagaaggcatgcgtttttgaaggtgacaggaatactctggtaactccaatgacctcttgaacgcctcaagaccttcatccgaaaggtgtcgcatcttcacccatggcattgccaaaagttcgcgataaacaggatcctcacatggttctggaaatagccagccaacactatatccctccgcatatttacgcagaacctctgctggagcgctgatatgacaaataatacagtctccatctaacccttcacgaattaaaggccccaccatgtacgcatcctgtcgcacatatcttggagcgccatgatctgtcgcaatttcggatagatgaacagcttgaagattgtattgtcgtagtaacttctggcttattaaataaatgtggccaatatcttcggatggagcgaaacaagcatttagagtacgcaaccaaactggatcttcaaagcaatcctctaccaaattgaccacatacttagaatcaaatttattacatgcaaaccaagcagcaacacgcggatcgccactaacatcaaggaaaaaggaacgaaacccataatgctgaaggattgcttggttggttgcattatcgccggtatcattccaaccgcgtactaagtgttgcaaggctctctttgcataataggtccacataatcatcaaatctggtacgcacccttgacgctgaaatgacgtgggcattgagggcgagccatctgaagataggtaatgtttagtttgtcctctgtagagaactcctggcccatattgtttaataactattttgagttcttcgagcgtctcgcaatgacaatgttccatcccacctctccattccaactttaatagtcgaataaatgctcttgactcaaatttagtgtgccattatacctattcgtctaacatcatcccttgttaggtacaacctcgtcggatagaagcttcttggattgtaaattttggacccaactcaatctgtagcgcatttattctaagaccaaaaaaatcaaaatgctgaagatcggtttttaattcttcaataaatacggatttataagcatttgcatcaaacccttggaataacactccagcattatccaatgcagtaaaaactctagaaacagcagaattgaatatcggcaacaagtccaaatacacttgctttgcggggtatcgatctactttcgttttttcccacactttttcaaaggccaagccattttccagagagacgaatctggataaagcatttgctttacccattgggtttaagtagtccgattcgctgcgtggatctaagcgactataaacatcttctaactttatcaaatgcatcatcaacggaggattgccacctgtcgttcgatgcctagcaattaaatattcagccccaagtagacgctcaggtttcccatccaaccaaatagtctggagaaggctatggaatagaggatgatcgcggtgatgaagagcatttcgaattgaaattaagaggctagtctcaggatgctcatggaagtcaaatatcgcttgtgatacatcatataacgtatgaaaaccctcaagattttgctcaaatgctcgatctaggttgtggatagcctcttcacggtcgattgctaccaattctcggtatcttaaaaatgcttccccatagagtcgcatattgttggcaaaacgcccaagagcattagtaataattgatacatcgcccatatcaaccctcagcatcttagtatttatagactcttcttgtgagtcctcggttggattgcataatcatataatggcgtactgaacatagctatcaatagcgcagggaatgtccgctcctggcacagagcagacgttaacacctacagcatcgggaagcttctgaatgccgcgtcagcggcatggaggtgccagatgaggttacatgtgtctgtggagtcacatggcgccgaaagcccggtgtagccggttaccgagctataaattcggtccccctgccctggttagccttaacccactaacagcaataaagaagttaaggtaatccctttaaccccggtgagctggctttacggcgtttacgacgtaaaggacgtgattttcagggccttaaccaaggtagcttgctgctgacgcttaggggatattcttcagttatttcaacgacaccagggaacttaacacggtagctgaaaagctcagcgccggatatcctgccgcccggccagcgaaagccggcggcaggtatacctctcaaggcagcatcttaccctttggcaaaattggcctggatccgctgctgcagataatcctcggcgctgatgggcgggtacttcctctgcggcccgaggatctcgacatctttattggcctggcagaaaaacgccaggctgtagcgcggcccctgatattcgtggagcagcgggtttctcacccggtggaagttagacggcagctggtcgtcgctccagcgcatcagcatatcgccgatattacaggtgatcacctcctcgcgcggctcaatgctggtccactgctggctttcgcggtctttaccgggacaaacctgcaggccgccctggccggggcgctggaacagcagcgtcagacagtcaaaatcggtgtgcgcgccggcccgccacatcccctgctgcgactgctcggttgcatagtaatgcagcatgcgcaaggtgctctgataggtgtcacgctgcggatcgtgcgcggtggtgaaaaacgattccggaaaaccgagcttcaaagcaaagcaggagaggatcttcatccccagctgccagcactgcgattcaaacccgagcatcgtctgccggaaacctggcagctcccgatcgctgggccagcgcccagccatcaacggccgggttatctgatacgactctttttgatccggggtgcgggtcgacggccgaacctgcgctttgctttcccagccggcgttaccggccagcggatactggcgcttcacctcgtcgggctggtcgaaaaacgcctcggtcatgctgaacgcctggcggatatccgccagcggaataccgtgatggctgacctggaagaagccaatctccaccgccgcctcccacagttgttcggcaatgtcattttttcttgcggcaaagttcgacaggtcgatacagcgcacttcgcgggcgaaggtctcttcaccctcggcgcccatcagcgcctctttttccagttcctgtaaggcgtagcgttgattctgggtggttgcgttcatcgtcattatcctgttatcagttaaacagcggcgcgctgttggagggtacggacggccgccagcgcgtcgtgacgcatcgcgtcaaggtcgagaccgggaatggcgtcgtcttccacgatggggcggccattgagcagtagcgccttcagcgcggcgcgcccaccgcaggccaccggcccaatggccatatcgtgcaggccgaagtagcgcggatcgtccagccggtaaatggcaaggtccgcctgcatgccgacctgcagggtgccgctctgcgctaagccgaggatctgcgcccctccggcgctgccccagcgcactacatcctccaccgtggccgcatcggccccaccctcaaaggtgcccccggcgtagcgcggctgcgccagcatccccttgcgcgcgcgctgcagcagccatgcggcatgggcttcgctttgcatatccgccgcttcattcgaggcggcgccgtccacccccagcgagaccgggaccccggcctgctctaacgccagcagatcggcgatgccgctgcccagccggccgttgctttgcgggcagtgggcgatgccggttccggtacggcccagcagggcaatctcctccggcagcagcttcaccagatgggcaaaccacacgtcatttcccagccagtcgtgttccgcgcagaactgcaccggcgtcatggcgaatttctgccgcgcggcgtcgagataatcgacggtttccgataaatggctgtgcaaccggatccccagctggcgggccagcttcgccatctcccgcagctgggcgcccggcgcggagtgcaggacggtagtgggcgccatcaccacccggcgcagagactcgggccgggggtcgtgatagcggctgaccagccgtttgacatccgccatatagccgtcgaaggtttccggacgcagcgccaccggcagatcctgttccaccgcccggccctgggtcgccccaccccggcacaggacgatgcgcatccccagcgcttccccttcgctgaagacaatctccgaggtatcgaaaggcatatccggccagtacaggtagttgtgatccgccacgctggcgcagcccgagcgcagaagctccaccaggccaatgcgcaccgccagacgaaaggtatgttcatcgaaagccgcgcgaaagcggtacggcgtggcgctcagccaggccgtcaggctctggttcagcccctgcggctcgcccttcagcagcgactgaaaaagatggtggtgcgtgttcacccacgccggatagatcacgcagtcgcgggcatcgatctgtcgctcttccggcagcggcgtcaggctgccgatggcggcaatcttgccgtcgcggatgcgaatatccggcccggccagccgcgccgcctctccgggcagaccgctgaggatggcatgggcatttttaatcattaatgacatggcgtcgctcctcagggtttaacctgcatggcctgaacaaattcggtggtgtaggcctgtttccagtcggtagccgccgccagcagaccggcgctgaccataaagtcgcgggtcttctgccagcgcgcgtcggtcatcgtcccccagccctggctggcggcatccccgccgtcgatcaggtgatgctcacggatctgggtcacgccccaggcgagcagatcgtcggtcattttcgggttgtcctgcttaatcaacgcattgcccggcgccggatccttgagatagctcacccagccctccattgaggcgcggacaaacttcgccatcgccgctttacgctcggcgatggtatccgggcgggcgataaggatgccgccgtaggggggatagccgtgctcggaaaagaggaagaagttcgccttcactccggccttctgcacctggaacacctcggagctgacataggcctgctgggcgacagcgtcatcgacgacaaagggttgaatattgaaggtataggggcgaacctgcgcgtcgctcagctggtattgcgccttcagccacggccaccacgtcgcctgaccggagctggagaccagcagggttttgtctttcagcccctgcagggaggtgacatcggcatgggtcagcagcccctggggatcgtactgaaagggcgcggcaatggcctttgcctggaagccgcgctgaatgccttccagcagctgcaggtcgtaaccgatgatcacatcggcccgcttcgacaacagcaactgcatgccgttgacctgcggtccgccggagcggatctcgacgtcgagaccgtattttttgtacagcccggtggcctgagcctgataataccccccctgttccgcctgggcgtaccaggaggtcagcagaacgattttctcctcggcctgaacggccagcgagacaccgccgagagccatcaggcccagccagcgtatgccccggggaaggcgtgcgcctgttttcatatccctctcctctttacgccgggagggggagcgagcgaatgtggctcagcctcccatcccggtcaacattgaaccgcgacatggtgactgagcaatgtcccgtatggataacccgtactgaccgcttctactcacactcagctatacaaaaacaatgccagatttaaacgcctgcgagcggccgcgagaaatcgcctgcgccgccccccttgggcatgcaacctttgattcatgcccacaagaaacgcaccataatggtgcgctaatgaatgattttagtgcctgcccgacatttcacagctggctgaagagcatctccagctggttcagcatcatcgaggcggcaagggaaagctggcgggcgggcgagacgcacagcgccagggtgaaaggcttaagctgcggatcggttagcggcacaaacgccagctggccggactcgatctcatcgagaatatccagccgacacaggatgccgatgcccatctgctctttgatcagggtgcggatcatgtgaatgttattcgataccgccacctcctttacctcgttgccgctgatgttcaccagcgcctccaccggctcgctgatcatcaatggggcggacggcaggataaaggggtagtcgaggcactgactaaagcgcaccgcgctgcggctggccagcggatggccggtgggcaccacaatccccatattcatctcggcaaacgcccggacctgcagttcacgagaggtctggggattgagcatgatgccgaaatccgcctcgccggagatcagcgcctgctggatgtggatattgttgatggtggtcaatgtaaaagagatgttgggataatgtttatgcacctctttgagcatcgtcgaaaagaaatgccggttaatggcatcgatggtggcgatgcgcacatgcccccgccgcaacccgcgcagatcgtccagctgctcgcagacccgggtaaagtcctttttccagttattggccgcgtgcaggagcagctccccggcggcggtcagcctcagcccggtgggatggcgctcgaagagcggcatcgccagttcctgttccacgcgcaaaatctgacgatcgatggaagacgccgacacatgcagcgcctctgacgctttacgaaacgatccctgacgggccacttcagtgaaatagagcagaaatcgggagaaggcaaacatggtttgggtgctctcttttttgcaacgggttgtgcgaatcaaagctctggacgcaacagttttatcacaataccgtagcattcatagcggagaaacgatcgtttcacccattttcttgcatgccggacagttcaccgcgaaggggagttatctcttcgccgcccctggccgccctgcagacagcggaatgagggagagtaaacggtaatgcacagccacgatcttatttcggtctcggtcggggaaatacgccccaacggacagggaaatctatccataattttgcagacggcggccggggaaatattaccggcctactccgccggggcgcatatcgatattattattcccggcgtcggtccgcggcagtattccctgtgcggcacgcctgaccgcagtaatacttatgaaatttgcgtcaggctgactgacacctccaccggcggctcacgctatttgcaccagcagctcaaagccggcgatcggctcgccatttcgccgccgcgcaaccattttcccctgccgcaggccgggcgctacctgctgtttgccggcggtatcggcatcacgcctttgctggcgatggctgaagcgattgccgccagaaagggggcgctggagctgcattattatgtcgccagttcgcgccagaccgccttctccccgcgcctgaaccagctgactgcgaacggcacggtggccattcactgcagcgaggaaggcgcgtcgtttcgccagcgggtccccgaatgcttaaccgtgccccaccctgataccgcagtaatagcctgcggcccggagggttttattcagcgactgcggtcggtcatggaggaatatcgctggtcgccgtcgcaattcgtcttcgagcgttttactcccgcggcggaaaataatactgcggcgaaaaatgcgttttatattgagctggcctccagcgggcagcgcctgcaggtggccgcggatcaaaccattgctcaggtattacagcacgccggggtggaggtaatgctctcctgcgaacagggaatgtgcggctcctgtattaccggggtcctcgacgggatccccgagcaccgggacagcgtgctgacggcggaagagaaagccggcaacgaccagatcacgctctgctgttcgcgggcgaaatccccgcttctggttttggatctgtgaggagactgacgatgacgttcccctcctcttccgcgccgctcgtcgggatcagccgcgcccgactcccggcctgggcgctgcccgacggctggccgacgcgggccaacggtgagccgctgctggcggacctggcctttcgcgacggccggattgccgcattgaccccaaccgaccagccgactcccggcctgtgggacctggcgggagccctgacgctccccggcctggtggaaccccatgcccatctggacaagacattcaccattgaacgctgccgtccggcgcaggccgggctgctggcggcaatccacgccatgcacgaggatcgccgacactggaccagggcggatattcaacgtcgggcgtccgccgcgctggcccgggcggcagcgaatggcgtgacccatttgcgcagccatgtcgactggtttaccgccgacgcgccggacgcctggcaggagatcgcccgcctcgataccgtcggcatcaccctggagcgggtggcgctgatcccgctgcccttgtttcgcgagctggcgcaagcggaggccatcgcccggacggtcgccaacagcggagagcgctgcctgctgggcggcttcatccactcctccaactgggacgccgccgccatggaaaatctgctgtgcagcgcagcccgctgggatctggatctggatttgcatatcgatgaggagctcagcgaagtgtctcaggggctgacctggctggcggatcatctctcccgccacccttttcccggacatatctgctgcagccacggctgcgcgctggccgccggcagcgacgaacaggcggcgccgatcctgcgccagctggcggcgcacggcgtcacccttatcgctctgccgatgaccaacctgctgctgcaggatgcgacgttcggccgcacgccgcgccagcgggggatcaccctgctgcacgaggcgcaggccgccggcgtggccaccctgctcggctgcgacaacgtgcaggatgccttctgcccggcggggagctacgacccgctggacaccctggcctgcggtctgttcggcgctcagctcagcgacctgttcgaccagcagtcgcggctgatctgcgatcgcgcggcgctaaccggttcgccggcagacgcggcgccctttgccgtcggggcggcggccagcgtagtgattttcccgggtagcgaccgttttacctggcctttaaacagcgccgcccgtctggtggttaaccacggcaggttaacccaccgacgcgtgtggcaggaggagatggcacatgagtcttgaagcaggcgccggggcgccgctggcgcggtatgccgcctggcgcagagccggcgattttatctttctctccggcattattccggtcaatcccctgaccggcaccatcgtcaacggctttcaggatgtgcctgagccggtgcgggagctgctgggggcgaccggcgaattttcaaccgatgcgaaacagggcccgatcctcgcccagagctggtacgtcctggagagcatccgccgcaccgtggcgtccgcgggagggcaaatgagcgacgttatcaaactggtgcagtactttcgcaaccttgaccattttccctattacagccgggtcaggaagctgttttaccccgaccagccgcccgtttccaccgtggtgcaggtcagcgaaatgctgcccgacgccacggtactgattgaagtcgaagcgaccgtctggttacccccgtcatttaactccgaggcaccgcgatgattaacggttacattcctgccgcgcgctttcttccttttctgagctggacggacgtggccgccctgccggataaaagcaatacggttatcgtcctccccaccggggcgatcgaacagcacggcccgcatttgccctgctcggtggacagcgtgatatcttccggcgtggcgggccatgccctcgccaggctgccggcgacgatcccggcctacgccattccgccgatcgtctacggtaagtccgaggagcatctgcattttcccggcaccctgacccttagcggcgatacgctgctgcataccctgctggagatcgccgaatctctctatcgggccggttttcgcaagctgctgatgatcaacggccacggcggccagccgcagatcctgcagatagcctgccgggaaatgcgcctgcgccacggggatttcatcgccatcccccacgacgtgttcaacgtgcccaactgcgaaaaacagtttctcagcccgcatgaacagcggatggcgatgcacgccgggcatagcgaaacggcgctgatgctggcgctggcgccggagtgcgtccatatggaacgggccgtcgctaatttccccccggaattcccctgcccaaccctgtcgaaaggccgtccggcggcggcgtgggcgtcgtatgactttggccccagcggggtgattggcgacccgaccccggcgacgcgggagcaaggcgaagggcttctcgactccctcgccgccagctgggcgcaagcgatcatcgagatccaccgcatggcctgggtcgaacgtcgcgaaccgacctggggcaaacagcactggcacggctttgtgcagtccctaccaccttctttcgctgctgaatccagggagccctgatgaataccagattgacgcccgtttttaccctgctgaccgtggccgccctcgcgacctcagcctcctgcttcgcggcggagaagtttacctttctcaccaactggtatgcccaggccgaacacggcgggttttaccaggcccaggccaccgggctgtatcaacacgccggtctcgatgtcgaaattaaaatgggcggcccgcagatcaacgtcatgcagctgatggcggccggtcaggcggactgcacccttggcgacaacggccaggcgctggagacctggcaggccggggtgcacgcggtgaccgtcgccaccgtgttccagcactcgccgacggtgtttatcacccatgacaaagtggagaacccggcggaacttaaagacaaaaccttcctgctcgccaccgaggcctatacctccttctggccgtgggcgaaaagcgagctgggtctggctggcagcaaagtgcgcccctatacctttaacgttcagccgttcctcgccgataaaaatctggtgcagcagggctacgtgacctcggagccgttctccgtcgccaaaggcggacagccgttctatgtctatccgctcagcgactggggctacccgccctacggcaactcgattatctgtatggccgacaccatccgcaaacgtccggcggcggtggcggccttcgtcaaagcctccatggaaggctggaaaagctacctgcaggatcccgcccccggcaacagcctgatcggtaaagcgaatccgcagatgggcgccgagcagatcgcctttggcattgcccagatgaagcagtaccagctggtgaccggcggcgatgctaagtccggcggtatcggcatcatcaccgagccgcggctgaagaaaacctgggacatgctggtgaaaaacaaactgatcgacgccagcaaggtgccgtttgagcagacttacaccctggagatggtcaaagacgccggagtgatgccatgaataccgccccgaaactgaccgtgatgagcgatacccgctttatacccgccgctgccaccccggccatcgaggtgctgtcggcggagaaaatctacagcaacggcacccgggcgctgctgcccgtcaacctgaccatcaatcagggggagtttattaccctgctcggcccgtccggctgcggtaaaagcaccctgctgaagatggtcgccggcctggtggagcccagcgacggcaagctgatgctgtggcggcgcgacagtcgggaaaaggcccagcatccgctgtcgttcgtcttccaggaagccaccctgatgccgtggagcagcgtgcgcaataacgtcaggctgccgctggatctggccggcgtgccgcgggcggagggcaatacccgggtgagtgaagtccttgagctggtgggcctcggcaagttcgccgacgtcctgccgcgcgaactctccggcggcatgcaaatgcgcgtctccatcgcccgcggcctggtcacccgaccaaagctgctgctgatggatgagcccttcggcgcgctggatgaaattacgcgtaacaaactcgacagcgacctgctgcgtctctggcaggagcaaaacctgacggtagtgttcgtcacccactcgatccacgaagcggtgtttctctcccagcgggtgatcatgatggcggcccgtcccggacgggtggtcgaagatatccccatccgcgagccgttcccgcgcagcgaggcgttccgcgtcagcccggccttttccctgtatgcccgtcagctgcaggacagtctgttgcaggccagccagtccggtatggagtcataatatgaaaaatacaaccgcaacgccgtggatccagcatccgcgttttctcaaaattctctatccgaccctcgtcgcggtggcgatggtgctcctgtggcagggcgcggtgagctatttccgtatcccggcctttctggtgccgtcgccgctggtgatgctggaaagcctgtggacgcatctcacgccgctgctgctggcgctgctgttcaccctcaagatcaccctgatctcgtttctactgtcgattgtcatcggcgccgcggtggcgtttatcctggtgcagaaccgctttgtggaaaccgccctgtttccctacatcgtgtttttgcaggtgacgccgatcgtcgccatcgccccgctgatcatcatctgggtgaaggatgccacgctctcgctggtggtgtgcgccaccctgatggcggtgtttcccatcatctccaataccactcagggactgcgcagcgtctcccccggcctgctgagctattttcgcctcaatcacgccagccgctggcaaacgctggtgcggctgcgtatcccctcggcgctgccctatttcttcggcgcgctgcgtatttccagtgggctgtcgctgattggcgcggtggtggcggagtttgtcgccgggaccggcgggaccaataccgggctggcctatcagatcctgcaggccggctaccagctggatatcccgctgatgtttgccgcgctgctgctgatctctctcgccggtatcgcgctgtttggcgtgatgtcctgggtttcgcgccgggcgcttagcgcctggcatgaaagcgaagccgtgcaatctcattaatgttctgctgacgaacaggaaaaagaatgatgactgatgaacagcgtcaacacgcggtcgcggcgatccagcaggcactcccggcgctggagtggaccttacagccggcgaagatcaaacggctctcccgcgattttcactggttcagtccgctactcaccgagcaactggcggggaaacaggcggacgcagtggttcgcccgcgcgatgaagaggagctgcgccagctggtctccgcctgcgcgcagcaccagctgccgctgaccctgcgcggcagcgccaccggcaactacggacagctggtccccctcgaaggcgggctgctggtggatatgaccgggctcaaccagatcgtcgccctcggcaacggcacagtgagggcccaggccggcattcgcctggcggacatcgaaaccgccgcccgcccgacgggctgggagctgcgctgtatgccatcgacctatcgactggcgagtctgggcggtctctacggcggcgggttcggcggcatcggctccatcaactatgggccgctggcggcgcccggcaatgtgctcagcgtcaaagtaatgaccgtcgagccggtcccccgcgtgctgaccgtcccggctcccgaagcgctgctgctgcatcacgcctacggcaccaacggcattatcctggaggttgagctggcgctggcgcctgcgcaccagtggattgaacgtctggacgtgtttgacgatttcgccgatgcgctgaactatgccaacgcctgcgtccgctcgccggggctggtgaagcgccaggtggcgctgctggccacgccgatcgctgactattttagccacctcaacgatcgttaccgcgccgggcagcatgcggttatcagcctgatcgccgaggagagcgaaggactctgcgccagcctgttaccgcgccatcgcgggagcaacgccatccggcaggccagcgaggaggcccggacgcgcaacggctcgttaatggaatactgctggaaccacaccaccctgcatgcgctcaaggtggacaatacgctgacctatctgcagacggcgtttgatccgctgcgctatccgcagcaaattttacagatggagcagcacttcgccggggaggtgatgtcccatattgaattcctgcgcgatatcgagggcaatctcaccgccagcggtctgcagctggtgcgctataccacgcccgaacgtcttaacgccatcatgcagatatttcgcgacaacgacgtcaagattaacaacccccacgtgctgcaggttgaggacggcaaacagggcgtgattcgtcccgacgtcgtggcggtgaaacagtctctcgacccggcgggattgcttaaccccggcaagctgcgcggctgggcgctgcgcgaccagctggaactcgacagcaacccgctgacgcgggccacccgcgaaagccccacgacctgatggtccccggtccggttgggcgctaacgggtcgctggcccgttgccgcccaacctcatcctgcgccggacagtcccgccatatggacgataaagcccaccgcggcggcggcggccatcggcaccagtcacagcagtatcccggcgctggtgctgttcgccctgatggaatggggccaccagcacgtgctgcatagcgcgtcgcctattgcattggtggacagcgccagcggcgagaccgtccatccggggttcgtcaccgccagcggcagcgtggcgagccccagcgcgctacagatcgtcaaagccggtacccatgccgaaacctgaggaatgtattcctggcactgcttgccggacgcgcggcctcgccattttcgaccggccacaaaagccctgggataggatgaaatctggctggaaacgcgccagtgaagaaaggatatcgtcaggcgggcagcagccccctgctgcccgcctgacgtgtgagtggcgttaattcacccgcgcagacaaggtaatttgctgcagggcattcgccatattaatctgaatcagctctttaagaccttcgcgcttaataaactggctccggtgcttacttttcacctcttcaatactctttttgatctcttgcgccggcagtttataccagccgcgagcctgtttctcaccgcccatttccagccacagcgatgaataactggctttcaccagatcgcttttcacgtggtaatcagaatcgatggcgtagaccgtggagatgttgaaatatcgcagcaaaccatacagcacgctcatgatgatatttttcggccgcgcgccatgcagctctttagtcagcaccttcacttcgtcattggtgatatctttcccgccctggatgccgccgatataagcgcggccatcgtcggtgcaggaaaaacagacgctatagacgcgccggtcgccaagaaacagctgcagcatcagctccccttcctcctgaaacggcgaggccagcagcttaacgtcaagcttatcgccatttttcaaggcaatagaaaacatctcgcggccaaaatccgcgacattgtagagctgcggcaggacatcagggtgaaacgttttctcgatgaaattcagtgaaccatgggcaatatccagtttgcgtcgttttgacatccgtttattgagatacgctttaaacggtttatcctcaaaaggcaccagtcctttggtcaccgcggtcaaccgcgcgcactgatatttcgcacaaagtccttgatattctctgtatttacctcctgcgagcgagagctctctgcattttcgtaaaatttttttatagcttattttgacctgaccgatcactttattatgtttacgccattctttgatggcgcctgcaacagtatgttccattgattaagatccatagattcatccataatcgcggccatattaacataaaagcgtttcgtcaacgcttaattactccttcgttgtcctttcatttaatatttaggcaggaaattatcctggcgacgttatttgtcgctaaacttattctgtcaacgattatttatggtaggtaacgccctccgctcagcgacttaacgctctgtgccttcggcgcgaagcgcggctacatctactggcggttatgccctatacttgaccctgattcaaaaccagcaacgataggtaacttatggaaattgatctcgacaacctggtcttcagcggcctggatgaagcggaagagcgcaacgcggagcgtctggaagaagcggacaaaaaagcccaggcgatcgttgccgacgacgactgcggcgacgcctgcaaaatctgattgtcaaaccggccagcaggccggttttttttgacgcccacacctcaggtgggtaaaaaccctttcagcgtatccagcagcgcctgcgccgccttcgacagcggcagatgtccggcatggatcgcgccgacgcacttctcaatcggcggatcgctgagcgggatgcagacggcgcccaacgatgccatctgcgttttacacagcgccggcaccgcgctgccccccaggccgctggccaccatcctccccaccgtcaccagctgatgactctccagcgccacgtccagctgacgtccgctgcgcgccagcgcctcctccagcatcaggcgtaccgccgaggggcgctgcagggtaataaagtcgagggtcaacagctcctgccagctgagctgctttttcttcgccagcggggattgttggggaacgatcgccacgaagcggtccaccgccagcggggtaaacagcaggttgtggttgggcgatggctcgaaagcgatgcccatctccacccgcccctcgcgcaccatctcgatcacctgctcattaatcacgtcatgcaccgtaacgttcaccccggcatagcggtcgcgaaaggctttcagcgcctccggcagaacgttggcggcaaacgacggcatcgcggcgaccgagattttaccccgctgcagggtaaagctctgacgcatggcctcctcgacgttatcccagtcggccagcagctgacgggccatcggcagaaagagttccccctcctgggtgagggtcactttgcgggtgctgcgctgcagcagcgcgccgcccagcgcctcctccaaccctttgatggtcaggctgagagctggctgcgacagattcagcctttcgctggcgtgggcgaaattcagagtgtgagctaccgctaaaaacgcgcgtaactgtttgacactcattctcatttttcatcctgttaactaattgaaaaaaattagttaacaggaaattaattaaaattccaaatgagtgagtcacaaattcaaaattatcaaatcagtcgcctgcgccaatgataaggctatcgcaaggcaggagagacaagatggcaggactggataaacgcgtcgccagttacgaagcggcgctggaagggttaacggacggcatgacgctgctcgccggcggcttcggcctgtgcggcattcccgagaacttgatcgccgaggtgcagcgtcgccaggtgcaggggctgacggtggtctccaacaactgcggggtcgacggtttcggtctcggcatgctgctggagtcgcgccaggtcagcaaggtggtggcctcttacgtcggggaaaacgcgctgtttgaacagctggtgctcagcggcgagctggcggtagaactcaccccgcagggaacgctggcggaaaaaatccgcgccggcggcgctggcatccccggcttttacaccgccaccgggtatggcaccccggtcgccgaaggcaaagaggtgcgccagttcgacggccgacactacatccttgaagaggcgatccgcggcgatttcgcgctggtcaaaggctggaaagccgactggtacggcaacgtggtctatcgccacaccgcgcagaatttcaacccgctgatggccaccgccgggcgcattacggtggtggaggtggaagagattgtgccgccgggcgaactgcccccctccgccatccatactccggggatctatgtcgaccggctgatcgtcgggcaattcgaaaaacgtattgaacagcgcaccctgcgcgccggagggcactgagatgctgacccgtgaacaaatggcgatgcgcgtcgcccaggagctgcgcgacggcgactacgtcaacctcgggatcggtatcccgacgctggtggccaactacattcccgccggcattgaagtgatgctccagtcggagaacggcctgctggggatgggcgaatttcccgatgaggaaaccatcgacgccgacatgattaacgccggtaaacaaaccgtcaccgcgcaaaccggggcggcgatcttcgattccgcccagtcgttcgccatgatccgcggcggccacgtcgacctgaccgttcttggcgcttttgaggtcgacgtcgcgggcaacatcgcctcatggatgatccctggaaaaatggtcaaggggatgggcggcgccatggacctggtggccggcgcgcagaacatcatcgtggtgatgacccacgcctcaaaaaacggcgaatccaaactgctgccgcagtgcaccctgccgctcaccggcgtgggctgtattcgccgggtactcaccgatctggccctgctggagattgtcgacggcgcgtttgtcctgcgcgaagtggccccgggggtcagccccgacgaggtgatacgtaaaacggcgggacggctgatcgtcgccgacgacgtgcgcgaaatgcgcttcagttaaggagagaccatgaccgatattgccattgttgctgcagtacgcaccccggtaggcagctttcgcggcgccttcgcccctctttccgccgtcgacctcggcgcagcggtggtgcgcggcctgcttgaacgctgccagctgcccgccgcagcggtcgacgaactaattttcggccaggtgcttaccgccggctgcgggcaaaacccggcgcgccagaccgcgctgcgggccggcctgccggtcgacactccggcggtcaccgtcaatctggtctgcggctccggactgaaagcggttcagcaggcggtgcaggcgatccgctgcggcgacgccgggatcgttatcgccggcggccaggagagcatgagcaatgctccctatctgatgcatggcgcccgcgacggcctgcgtttcggccacgccagcctgcaggacagcatgatccaggacggcctgtgggacgcctttaacgactaccacatgggcattaccgccgagaacctcgccgacgccttcgacatcagccgcgagcgccaggacgccttcgccgccagctcccagcgcaaagcggcggccgctatcgccgccgggcgctttcgcgaggagatcgttccggtcagcgtcccgcagggcaaaaagccgccgcgagtcgtgactgacgatgagcaaccgcgcccggagaccagcgagcagcagctggcccagctgcgcccggcgtttcgcccggctgacggcagcgtcaccgccgggaatgcctcgtcgctgaacgacggcgccgcggcggtcctgctgatgcgtgtcgataaagcgcgcgagcttgggctgccggtgctggcgcgcattgtcagctcagcggtcgccggggtcgacccgtcggtgatgggcatcggcccggtgagcgcctgccgccaggcgctgcagcgcgccggctggacgctggacgaggtggaccttatcgaagccaacgaggcttttgccgtccaggcgctggccgtcggtcagctgcttgagtgggatagcgagaaggtcaacgtcaacggcggcgccatcgccctgggccatcccatcggcgcctccggctgccggatcctcgtcagcctggtgcatgagatgcagcgccggggcgccagcaaagggctggcaaccctgtgcgtcggcggcggccagggcatcgccatgaccctacaacgttaacaggagccactatgtttacaccacgcctggcggtactcggcgcgggactgatgggcgtcggtatcgcctgccatttcgcccgtcacggtcacgccgtccgcctgtatgacaccgacccgcagcgtctcgctgaggttccggcggtggccagcgccatcctgcgcgagctggaggccagcggtcaacaggatcccgccgaccgcgacgcggtgctggcccgtctgacccccaccccgacgctgaatgccctggccgatgccacgctgctgattgaagcgatccccgagcggctggcgctgaagcacgccctgtacgccgagctggaaacgctgatcgccgacgagacgattatcgccagcaacaccagcggcctgccgccggatcggctggcgcagggcatgcgccaccctgaacggttgctgatcgcccatttctggcatccgccgcacctgatcccgctggtggaagtggtgcccgggagcgccacgctgcctcatctggcacgccaggtgagcgacttttgcgccgcctgcgcgctggaggcggtggtgctcaaccgcgccgcgccgggctttgtcggcaaccggctgcagttcgccctgctgcgcgaagcactgcatatcgtccacagcggcatcgcttccccggaggtggtggaccaggtgatgcgcgcctcgctgggccgccgctatgcgatggtcggcccgctggaggctgcggacatgaccggcctggcgacggtccaggatatctgccagcacctgctgccggagctggccagcggcacggagatgatgtcgctggtggcggagaaagtggcgcgaggcgacaccggcgcccgcagcgggcaaggcttttaccgctgggacgaggcccggcaccagcgcatccagtcgcgccgggaacaccagctgcgcttcgccctgaaaccctagtatcgcgttctgtacccctacaataacaatgagagtgagacgtcgtgatgagtgtgataatagccctggccgcgctggcgttactgatgctggcagcctaccgtggatacagcgtgatcctctttgcgccgatcgccgccctcggcgcggtgctcctcaccgacccgggcgcggtcggcccggcctttaccggcctgtttatggaaaaaatggtcggctttgtgaagctctatttcccggtgtttctgctgggcgcggtattcggcaagctgattgagctgtcgggattctcacgttcgattgtcgccgccgccatccgcatccttgggcgccgccacgcgatcccggtgatcgtgctggtgtgcgccctgctgacctacggcggggtgtcgctgtttgtggtggcctttgccgtctaccctttcgccgccgaactatttcgccagagcgggatccccaaacggctgatccccgccaccgtcgccctcggggcattctcgtttaccatggacgccctgcccggcacgccgcagatccagaatattattcccaccagcttcttcggcaccaacgcctgggcggccccctggctggggcttatcggctcgctgttcattatcatcttcggtttgctgtggctggagcgtcagcgccgcaaagcgcaggcccgcggcgaaggctatgggaccgacctgcaaaatgagccgcagaccccggatgacatcgatctgccgcatccgctaatcgctatcgccccgttgctgctggtgggggtgctgaatttgctgttcacccactggatcccgcagtggtacggcgccagccatgagctcaacctgccgggcctggcgaagcctgtcgtcaccgaagtggggaaaatcaccgccatctgggcggtgcaggcggcgctgctctccggcattgtgctggtgctggtttgcggctatcgcaatatccgcggccggctggcggagggaagtcggacggcggtgggcggggctattctcgcggcgatgaacaccgcctctgagtatggcttcggcgcggttatcgccgccctgccgggtttcctggtgctgtcaaaagccctcgcggccattcccaatccgctgttaaacgaggcgatcagcgtcacggtgctggccgggatcactggctcggcctccgggggaatgagcatcgccctggcggcgatgtccgagacctttgtcgccgccgcccacgccgccaatattccgctcgaggtactgcaccgtgtcgccgccatggccagcggcggcatggacaccctgccgcacaacggggcggtgatcaccctgctggcgatcaccggcctgagccatcgccaggcctacggcggcattttcgccatcacggtgatcaaaagcctcgcggtactgtttgtcattgccacgttctatgtgaccggcattgtctgataccagattgaaggagtaatacaatgaacttacacggtaaaacggcgctggtcaccggctccaccagcggcatcggtttagggatcgccaaagtgctggcgcaggcaggcgcccagctggtgctcaatggcttcggcgacagcagccacgcccgggctgaagtcgccgcgctgggcaagatccccggctatcacgacgccgacctgcgcgacgtcgggcagatcgaggcgatgatgcactatgccgaaagcaccttcggcggcgtcgatatcgtgatcaataacgccggcatccagcacgtggccccggtggagcagttcccggtggacaaatggaacgatattctcgccatcaatctctccagcgtcttccacaccacccgcctggcgctgccgggtatgcgccagcgcaactgggggcgcatcatcaacattgcctcagtgcatggcctggtggcgtcgaaagagaaatcggcctacgtcgccgccaagcacgcggtggtcgggctgaccaaaaccgtggccctggaaaccgcgcgcagcggcatcacctgcaacgccatctgcccgggctgggtgctaaccccgctggtgcagcagcagatcgataagcgcatcgccgagggggtcgacccggagcaggccagcgcccagctgctggcggaaaaacagccctccggggagtttgtcaccccgcaacagctgggcgaaatggcgctgtttctgtgcagcgacgccgccgcccaggtgcgcggcgccgcatggaacatggatggcggctgggtggcgcagtaagccgctggcgccgcgaagatcagaacatcgccagaaagcgtttcaccgtacgcgagcgctcgaagcgccgccaggcgatggcgatatcggtcttcagcggcgccccgctaagcgggtgatagctgacgttcggctgctggatgcaggtcatcgactgcggaaccagcgcgaagccgaagcctgcattgaccatgctcagcgacgatgaaatttgcgacgactgccaggcgcgctccatatcgatcccggcgcgcaggcaactgttatacaccagctcatacagcccgggggccacctcccgcgggaagaggatcggcgccacgtcgcgcagctgctccagggccagggtcggctgcgtcgccagcggattatcgcgcggcagcgcgataaccatcggctcctcatcgataatccgcagattaaaggctttactgctctcgcacggcaggcggacgaaggcgatatccagctcggcctcgctcagggcggtcatcagattggccatattgtcttccatctggtgcagggtcaccccggggtggtcgagctgaaaacggtgcagcagcgtgaagatttgcggatggaaagcatcagaactggtaatgcctagcgacaggctgccgttcatcccgcgcgcaatgcccttggccttctccagcgccgcatcgctcatggcgaggatctggcgggcatcctcatagaaagactctcccgcttccgtcagctccaccccgcgggttaaacgccggaacagcggggtccccacttcgcgctcaagccgctgaatttgctgacttaacggaggctgtgaaatacccagctccttggcggcctgggtgaagtgccgcgtcctggcgacggcgacaaaatagcgaagataacgaagttccatatcgaaaacgtctcaaaccagcatggtttctatattggaactgtgagctgaatcgggtcaacatttatttaacctttcttatatttgttgaacgaggaagtggtatatgaatcattctgctgaatgcacctgcgaagagagtttatgcgaaaccctgcgggcgttttccgcgcagcatcccgagagcgtgctctatcagacatcgctcatgagcgccctgctgagcggggtttacgaaggcagcaccaccatcgcggacctgctgaaacacggcgatttcggcctcggcacctttaatgagctggacggggagctgatcgccttcagcagtcaggtctatcagctgcgcgccgacggcagcgcgcgcaaagcccagccggagcagaaaacgccgttcgcggtgatgacctggttccagccgcagtaccggaaaacctttgaccatccggtgagccgccagcaactgcacgcggtgatcgaccagcaaatcccctctgacaacctgttctgcgccctgcgcatcgacggccatttccgccatgcccatacccgcaccgtgccgcgccagacaccgccgtaccgggcgatgaccgacgtcctcgacgatcagccggtgttccgctttaaccagcgcgaaggggtgctggtcggcttccggaccccgcagcatatgcaggggatcaacgtcgccgggtatcacgagcattttattaccgatgaccgcaaaggcggcggtcacctgctggattaccagctcgaccacggggtgctgaccttcggcgaaattcacaagctgatgatcgacctgcccgccgacagcgcgttcctgcaggctaatctgcatcccgataatctcgatgccgccatccgttccgtagaaagttaagggggtcacatggacaaacagtatccggtacgccagtgggcgcacggcgccgatctcgtcgtcagtcagctggaagctcagggggtacgccaggtgttcggcatccccggcgccaaaatcgacaaggtcttcgattcactgctggattcctcgattcgcattattccggtacgccacgaagccaacgccgcatttatggccgccgccgtcggacgtattaccggcaaagcgggcgtggcgctggtcacctccggtccgggttgttctaacctgatcaccggcatggccaccgcgaacagcgaaggcgacccggtggtggccctgggcggcgcggtaaaacgcgccgataaagcgaagcaggtccaccagagtatggatacggtggcgatgttcagcccggtcaccaaatacgccgtcgaggtgacggcgccggatgcgctggcggaagtggtctccaacgccttccgcgcggccgagcagggccggccgggcagcgcgttcgttagcctgccgcaggatgtggtcgatggcccggtcagcggcaaagtgctgccggccagcggggccccgcagatgggcgccgcgccggatgatgccatcgaccaggtggcgaagcttatcgcccaggcgaagaacccgatcttcctgctcggcctgatggccagccagccggaaaacagcaaggcgctgcgccgtttgctggagaccagccatattccagtcaccagcacctatcaggccgccggagcggtgaatcaggataacttctctcgcttcgccggccgggttgggctgtttaacaaccaggccggggaccgtctgctgcagctcgccgacctggtgatctgcatcggctacagcccggtggaatacgaaccggcgatgtggaacagcggcaacgcgacgctggtgcacatcgacgtgctgcccgcctatgaagagcgcaactataccccggatgtcgagctggtgggcgatatcgccggcactctcaacaagctggcgcaaaatatcgatcatcggctggtgctctccccgcaggcggcggagatcctccgcgaccgccagcaccagcgcgagctgctggaccgccgcggcgcgcagctcaaccagtttgccctgcatcccctgcgcatcgttcgcgccatgcaggacatcgtcaacagcgacgtcacgctgaccgtggacatgggcagcttccatatctggattgcccgctacctgtacagcttccgcgcccgccaggtgatgatctccaacggccagcagaccatgggcgtcgccctgccctgggccatcggcgcctggctggtcaatcctgagcgcaaagtggtctccgtctccggcgacggaggcttcctgcagtcgagcatggagctggagaccgccgtccgcctgaaagccaacgtgctgcacctgatctgggtcgataacggctacaacatggtcgctatccaggaagagaaaaaataccagcgcctgtccggcgtcgagttcgggccgatggattttaaagcctatgccgaatccttcggcgcgaaagggtttgccgtggaaagcgccgaggcgctggagccgaccctgcgcgcggcgatggacgtcgacggcccggcggtagtggccatcccggtggattatcgcgataacccgctgctgatgggccagctgcatctgagtcagattctgtaagtcatcacaataaggaaaggaaaatgaaaaaagtcgcacttgttaccggcgccggccaggggattggtaaagctatcgcccttcgtctggtgaaggatggatttgccgtggccattgccgattataacgacgccaccgccaaagcggtcgcctccgaaatcaaccaggccggcggccgcgccatggcggtgaaagtggatgtctccgaccgcgaccaggtatttgccgccgtcgaacagtcgcgcaaaacgctgggcggcttcgacgtcatcgtcaacaacgccggcgtggcgccatccacgccgatcgagtccattaccccggagattgtcgataaagtctacaatatcaacgttaaaggggtgatctggggcattcaggcggcggtcgaggcctttaagaaagagggtcacggcgggaaaatcatcaacgcctgttcccaggccggccacgtcggcaacccggagctggcggtatatagctcgagtaaattcgccgtacgcggcttaacccagaccgccgctcgcgacctcgcgccgctgggcatcacggtcaacggctactgcccggggattgtcaaaacgccgatgtgggccgaaattgaccgccaggtgtccgaagccgccggtaaaccgctgggctacggtaccgccgagttcgccaaacgcatcaccctcggccgcctgtccgagccggaagatgtcgccgcctgcgtctcctatcttgccagcccggattctgattatatgaccggtcagtcattgctgatcgacggcgggatggtgtttaactaataaaaaaagctctgacatggcttgcccctgctttcgcgcaggggcttttttttggtttgggtgtgagcttcgtgcaaaacacagcaacgatatttgaaagtctctggcgttgtcacttacgcttcagcacaacgtggcaatctggctgggatgaaagtatgctttgagcgaagagctacctgtcactgtgtgcgattgaatattttgtcacacgagcataacaaccctgttgagaaatctggatctaacatctatatatcagcaatatactccactttataaaccgtagatcaggagattactttgcaaccagatcgctcaagactttatcttcgccgcgtaaacgcatcagatatagatgatctcttcaggatttatgacgaccctgcaacaaatacgttcaatccagcaggcccgtatcccgatattagtcacgcacgtaatgtaatggcccgctggcttaaccactgggagaattataggttcggaaactgggctatctcactgaaagagaatcccgatagaattatcggttttggagggcttagcattatcagttatgacgatacaccgataatgaacctggggtatcgtttctctacagaatcatgggggaaaggtctggcgacagagttcgctaaatatgcggtcgggtacgggtttgatgttttaaaactggctgagatttctgcggtagtaagaccaaaccatctggcatcccaaaagatcctgacgaaagcaggtctccggttttcacgaaatattcatgacgtgaaaaatgagcccgcaagcatgctttttactgtgactctggatgagtggaacaacgcgctaagtaggggaactaccccacccattgatcattagagttcatgcgtaacgtccgctgctgacgcggatcggacgagcgactgagttgtaggtccgctatgagcgatcttcggacattgcaaatctcgcagtttgatttcatgcgaagcagcccaaggctgctctgttttataacaggtgtcaggctttaattaatgcaatcacagagagaatagtcttaccgggctcctgagaaaaatctggagcaaactgcgctgcaagagtgcttaaagaagtaatcacacctccagcctgctcagcctgcctgagcgctgcgtcttctgttctcgaagagcggctaccgatgcagtctactggaatgaatacattgtaaccagcctgaattccacccagggttgtaagtaagacagccacttcagcagtgtagccagccactataagggtttttcggccagaacgtttaatggcgtcagtaatctcagaaacctggaatggatcggctattttacgaaaaatggtgttgtgcgtatcggcatactccctgagcgaaggtaccagctcgcccggtttaccattttgagtaaccgtcagaaagtaagaaggggcggaaacaacttttgcacattttgcaagcccccctacatttgcagtcaaagactcgggagatatcgtattacatgtacttaccaggccgggatgtaaatcagcaaagataaaaacggcatcatctttttcaacgctgaacctgttatccattttgctgcttcctgataatccgggattattagattcttttatttcgttatctgcgtttgcagttgcggacatacctaaagctattgcgcccagcattgcgctacctgcattaataaaatctctacgctgcattttaactttctccattggccagtttgagaaggagcggatgggtatgatattttcactgtaaattctgctgaaaatgatactggtgtgtgctgtccaggcctctggagtggaggaaattctctacaatatctgctatctgctgattattcttatccgcaaacgcaaaatgagtgttcccgtgtattccatgctcgggaagaataaagagcgtagcctgcccaccatgtcggttgagagtatcaacgaattgccgcgcacgtatttcattaacgcgccagagttcctcaccaaaactcgcactctcagaccgtacaacgttgtccccaatgatgaccataacggggatggctgttaatgctctgaatcgctcaggggaaacaacctgcggggctgttgcttttcctacaaatgacagtgaggttttaacatttttagggaggtcattcgaaggaaacgcaaacgcccctggctcgaaagcaataatgcttcgaaccaacttcggagactccattgcagtctcccatccatactgtccgctcagtgaatgagtcatcagaatggcaggtcccgtttgtttcaacaaagcagtcatggatttcgccataaattgcctttcctgaatatccggtgagggctcaggcccggtattcggggtctgccatcttaaaaattgctcaatggcacgctcgttttgaggaaattgagagtcgctgaaaaaaaccggtttttgtggcgggagccatttacccagtctgaacgtattccatgcgatggattctttatggtcggtgggaatatctgatactgcggagcccggctctgttcttcctgccctcccacggcgcggctggtcaattataaaaaccggccagtgtgcacgggtgaacatttgccagaaaccgtcacgtccatcaggcgttgtttcccatgatttgcctgattgacctccaccatgccacatcactacaggcaggctgtgactgctctgaggaataaaatactgagcataaccatgatcgtaatgaaaagtattaccttcctcatccatatcggtttttcccgcaaacatcaggctacccatgtctgtcagcacaatggggggccgtgctgctttatcgtagcgggagatatctgctgcgttgctgaccgatggcagcagcagagctgctgccatcaatggcaagattgacgcatcaaatttttttttcatgataaggcgcttattctcggagaattaaaaatcaggtattaaagatttttgtgccaacggttttaattcgctcaggatcggtatgtgctgtaaacaacgttttaccggtatcaagctggctgattttctccatatcagcatcgctgattgagaaatcaaatacgttaaagttctcacggatgcgcggcagattaactgacttaggtataacgataacattacgctggatcagccagcgcagaacaacctgggctacgcttttattataaacctgtgcgatcgaggcaagcagtggattgctgaacaggttgttttttccttcggcaaatgatgcccaggattgtgcctgcacgttcatactctgcatgaactcaacgttttgtccctgctgcaagaaagggtgcatttcaatctgattgacagctggcgtaatacgattaaacgttgccaaatcggtcaatcggtccggagcaaaattactcacgccgatagccttgatcaggccttcatcatataactcttccatggcgcgccatgcaccgtgtacatcagagtaaggctgatggataaggtataaatccagataatccagcttaagacgatcaagtgctcgcaggaacgcgctgcgggctttttcataacccgcgtcctgtacccataatttggtagtgataaacaattcatctcgcgcgatcccgctttgctgaatggccgcgccaacggcggtttcattctcataagcagcagcagtatcaataagacgataacccgtctgaagagcaccaagaacggcttcctgacattctttcaagtcctgcatctgatagacgccaaacccgagtataggcatctgaacgccattattgagggtagtaaatttcatgagcattgtcctgtcagtccagaaagatgagataaattcccggccaatatagtttccgtttatcaaccagaagcattgctattttacaagggctcgattagcattttaataacgtatagtctaaaaaactttatctggagtctaatggatcccttttctgatgttttgaatctgctgtctgcccgcagctatgccactgcaggtctttccgccggcaatcactgggctatgtcttttcccggatataacggactcaagttcatttttataaaaaaagggatgttctggttcagactggaagcggaacctgaatggacccagctgagtgaggggcaaggcctcgtgctgacccgatatgcccgctttttaatggcgacggacgttaacatcccgccagctgagtcctctgagaaaaaaaggcctcgcgttaacgagaccgtcaactatggaggtgacgaaaacctgttactggctggaaagatggaaattgatcttacttcttcagatattctgcttaacggcctgccgcttgttcttcattttaatacgcagaccgatgacagttctgcgctgtgcacgcttatgtcgctgttctttagggaaaaggtagctaataagccaggctctgttcaggcctgtgactaccttatgcacctgatcatgattgaagtgctgagaagtggatacgaaaagtcatctgaaggctgcgtagtcatcgacaaatttagcgatgcccgtataaacaaggtacttagcgcaattcatcaggaaccagaaaacaactggagtttgcttgagctggcaacaatatctggtatgtcacgagctggcttttcaaaaaaattcagggaggtaacgggactcacgcctcttctgtatctgacaaactggcgtatgcggcttgcgagtaaatccctgagatatacccgtgagtctgtaaagctgatttgttttaagctgggctacagttcagaaagtaccttcagtagtgccttcaagcgcgtttatggcgtcgcccccagaatttatcgtgatcaacactttcaggcaggcttaaaaaaagacgattaaagcctaatcctttcgcacacaggcgattcattagttaacgaaacctcatcgctttttattagattttatctagtcaggctgtgggtatatttcatggttacatcccagcgccccgaatgacatctcacccggagggcgtgactgaaattattgaagtggttactaagttatacaatggcgctaaaaatttgtgactggcacctgctcaaccagaatacattgatgtaagccacgtccgcttttggcactcagcagacatgaaattctggaatagcattcgtacacttagaacatcgagaagcttttgaaagccgcgtcagcggcatgacagcgccagcagagaaaaacccggatggcggcgtatggcgccttatccgggctacgctctggtgccgtatttttgccgggtggcagctacgccttacccgacccggtgatttggcgctcaattcgcgcccttcgcaggcccgcgcaagcgtagcgccgccgggcaagggcagcgggtgcggagccgcttttgtgccgggtggcggctgcgacttacccggcctacggtccgtgcgacttgtcgttaatttattcaccattgttgctgaaactgccggtgctggcggcctcaaaatcgctgagacgttcccggaaggccggggcagcccgcatggatgcgggctgagggccgtgttttgcacggacgctgcctcggcccgacccgaagcctgcggggataagtcgaagggaccgcgtagcggcgattttgctggccggagcccgggggtacagggggcggcggcgactggccgccccctgtgcgctccctgcgccatgccaggcataacgcagaagattaaccgggagcgcaaaatacgctgaagccacagataacataaaagacttcccggcagtgctttccctcacccaggccttcttccggagggagagagaaccgtacggcagtcgttgccgttccatgacgctccctgcgccacggagaaccaggtgcagcaccacgaagcgggagcacagagtacgctgaagtcacgcgtgagaaacgctttcccgggctgagaaccaggaaaccaataatagtctccaccaccgccggcaagaaatcaggctccgagcccaacatgttgccgggtggcggctggcgccttacccggcctacaaaggccacccgcgatttggcgctctattcgcgcccttcgtaggcccgcgcaagcgtagcgccgccgggcaaggacagcgggcacggagccgattttgtgccgggtggcggctgcgccttacccggcctacaaaactcttctggtggcatgcccaggcccgcgcctgcgcagcgccgccgggcagttactgcgcctgctgctgcgcctgcgccagctggcggacgatcgcctcgcgccgcgcatccccttccggtagccgggccagcaacgcctgcagggccgccacggcctcggggtaatcttcattgcgcaccgcgctcagggccagcatctccagcaccggcaggctgttcggctgccgctgatgcaggtcacgcagcagcagctcgcccatccgaacctgaccgctatctcccgcccgcaccagcgcgctggcgtaatcgaaagccgccgccgggtcgtccgccgccagagcatgcgcccggccaaaggcgccgatcgccgtctcgccatcgtttaacaacaggcccagccgcccaagcagctgccagccggcgaggtcgttcggagtatcctgcaggtggctgcgcaggccaagccgcagctccgccagctcatccattcgcagcggcgccgccgtcgggtccttaacctgctgcaacagcgcaggaaaatgtcgttcagcctgctgccagagcagcacctggccaatatcgctggttttcagatacaggcccagactcaggaccaccagcagcagcgcgcccggaagcagcgcccagcggcgtagcggccgttcgccagactgtgcctggggcggaatatccgtcagcagcgtgcgctgcagctcgacgaccagcgccgggttgtcctcgccgcgctcctgcgccagctcctgcaggcgcgactggtacagggcgcggttgagggcatcgcggtctaccgcccctttgcccgaccacgggaagtacagcagccccagcgcgccagccagcagcagcgcgacgataaccaccaacaggctcatcgttcttttccttcttgcaataatgccgccagccgctggcgctcttcggcgctgagcgccgcgtcaggaatgtcgcgacggcgggcgcgggcgataatcactcccgcgcccgccagcacgaacaaccccggtcccagccacagcagcaccgtgcccgcggtcagcggcggctcatagctgacaaaatgaccgtagcgggccaccatatagtcaacgatctgccctttcgttttcccctgctgcatcagctcgtacaccttctgccgcatatcagcggcaatcatcgcgtttgagtcggcgatgctgttgttctggcatttagggcagcgtagttgggaggtgatctcgcggaaggcctgctcctgggcctcatccttaaactgccaggtatcgatggcggcccacgcctggccggtcagcatcagcgccagcaggatgaccattacccctctcatcaacccgccctccggttgtattgatcccacagcggctggagctcctcgcgccacacccgttcgttcaggtcgccggcgtgccgccagcggataatgccctgaccgtcgataagaaacgtctccggcgcgccatagaccccgagatccaggccaagcatgccgttgccgtcgtagaggctcagcctgtagggattacccaggcgctgcagccagctcatcgccttctggcgatcgtctttgtagttcatccccaccacccgcacgccctgctgcgccaggccgttgagaaactgatgctcggcgcgacaggttggacaccaggtggcccagacgttgagcagcagcggcttgccgtcaatcagcgtccgtcggtccagcgtctgatcggggtattcagcgcttcaaggcgaaattccggcagcggtttgccaatcagcgccgactcgagggtcgtcgggtcatcgccctcggcgttgcgcatcagttgccagaacagcgcggcggccagcgccagaaacagcgccagcgggataaacagcagcttccggttcatgaggcctcctgcagcttcttacgcatccgatagcgcgggtcgagcatgcagcacagaccgccgagggccatcagcaccccgccgtaccagatccagcgaacgaacggtttgtagtacagacgtaccgcccagctgccgtcgctcagctcttcccccagcgcggcgtacagatcgcgggtcagcccgccgctgatcgccgcctcggtcatcatcatccggctggcggtgtaaaagcgtttctcggcatacagcgtcgcttccgggcgtccgctatgggtcacggcgataatgccttcgccgccggtccagttggggccgacgatattgcgcacaccgttaaacacaaagtgatagcggtggatatcgatgctgtcgccggggcgcatccgtacatcgcgctccacgctgtagttctggctaaaagtgatgccgataacggtcaccgccacgccgacgtgaccgagcaccatcccccactggctgcgggtcagcgtccgcaggccgcgccagaagccgtggcgatgagtggcccgttcgtgaacctccagcagggcgaagatcagcacccacagggccatcatcaggccaatgaccgccatggcggtgatacgatcctgcagcagccacggcagcgccagagaaagtgacaacgtcaccaccagagcgataatcaggcgcttaatctgtctggcgatgtcatcgcgccgccagcggatcagcggtcccagccccagcagcagcgcaaacggcgccatcagggcggtgaacatggtattgaagaacggctcgccgatggagatgctgccgaggcccagctccttatgcaccagcggcaacagcgtcccgaggagcaccaccagcatcgcggccatcagcaaaatattgttgccaagcaggaacgactcgcgcgaccacagggtatgttccacccgcgcccgcacccggccgcccttcagggcgtacagcagcagcgacccgccgatggcgacaatcagcagcgccagaataaacagcccgcgcgacggatccgaggcgaaggcatgcaccgagaccagcaccccggagcgcaccaggaaggtgcccagcaggcacagggagaaggcggcgatggccagcagcaccgtccaggcgcggaagctgccccgcttctcggtcaccgccagggagtgcagcagcgcggttcccaccagccacggcataaacgaggcgttttccaccgggtcccagaaccaccagccgccccagcccagttcgtagtatgcccacgccgagcccagcacgatgccgagggtgaggaacatccatgccgcctgggtccagggacgcgaccagcgcgcccaggcagtatccagccggcccgccagcagcgaggcgatggcgaaggcaaaggccaccgagaagccgacataacccatatagaggatcggcggatggaaaatcatgccgatatcctgcagcagcggattgaggtcgcggccatcaatggggtactgcggcaggccgcggctgaacggattggaggtgaagaggataaacagcaggaaaccaaaggcgatcatccccatcaccgccagcacccgggcgacggcgtcgagcggcatccggcggctgaagagggcgacggcgaaggtccagacgctgagcagcagaacccacagcagcagcgagccctcgtgcgccccccaggtcgccgctacccgataccacaccggcagcgcgctgttggagttttccgccacgtagcggacggtaaagtcattgaccacaaaggcgtgcaccagcagcaggaaggcgccgccgatacaggcgaataggccacaggccagcggccgcgccagggccatcagccgccggtcctgccgcgccgcgccccacaggggataaacgctcaggagcagcgccagccccgccgccagacacaataaaaagttgcccagctccggcatcatggctgcgcccccgttttctccggcgtcatggcgtttttcacctccggcggcgtgtaattttcatcatgtttggccagcacctgctgggcggtaatatgccgctcgccgtccagcacgccctgggccaccacgccctgcccttcacgaaacaggtccggcaaaatgcccttatagctgacgtccacgaccccgcgggcgtcatacagcttaaagcgcacgtcgagggtttgcgggtcacgctgcagggagcccggctgaacgtagccccccacccgcaggcgctgaccggtatggggcagcgcccgggtttccgttttaccgtagataatttcccccggggtgtagaacagatcgatattgctgctcagggcgtacagcgtcaggctgacggttagcccgaggccggcgagcaccgccagcacgatatacagccgggttttacgacgcgcttgcatccgcggcctccttgtcatgttcgcgggcggcagcgatccgccgctcgcgcgcctgctggcgtcgcacctcatggaacagcgcccgccgcgcccacagagtgtgcaccgtcagcaggccaaaggcggcgacggtcacggccaccgccagccagacgtacacggcatagccgcccatattcaggaaggcggcgaaagacgaaaaggcggggctcatcgggcggctcctttattcaccagcgccaccacccacggtcgacggcgctccagttgcaggatcaggttacgcaggcgcatcagggtcagggtgaccgacagcgtgaggaaggcaaagatgcagatccgcagcggcagacgcatgcttgggtcgatggtttgctgcaggttggtcgagccctggtgcagggtgttccaccagtagaccgagtaatgaatgatgggcagattgaccaccccgaccagcacgaggatcccggccgcgcgcccggccagccgccggtcgtcaaaggcgtgccacaaggcgatgaccccggcatacagaaacagcagcaccagctccgaggtcagacgggcatcccagatccaccaggtcccccacatcggcttgccccatgccgcgccgctgaccagcgccaccagggtgcagaccgcccccaccggcgccagggcggcgatcgccaggtcggccattttgatctgccagaccaccccgacgaaggccgcgacggccatcgccaggtacagccccatcgaccacatcgccgtcggaacgtgaaggtacatgatccggtagctttccccctgctgatagtccgcgggggcgaagccaaagccccaccccaggccgatgaccagcaacagcgcgctcaacgccgccagccaggggatccagcatccgcacaggcggtacagccgctcggggatcgccagttgatgtaacgctttccacatagacgcttactcacacggttatgatggccgcgcccgcaggcgcagcgagttatcgcacggtcagccgcagcgcagcggcggtggcgaacggacacagggtggcgctggcggttaagaacgccgccagcatcgccagatagccgctgaccgggagcccggcggccgccgcctggcaggccgcggtggcgaaaatcagcagcggcaccgccagcggcagcaccagcaggctcagcaggacgccgccgcgcttcaggccgaccgtcaggccaacccccaccgcgccgagaaaactgagcgtcggggtgccgagcagcaaggtcagcgccagcacaccggcgtcatgcagactcatccccagcagcagcgccgccagcggcgagacgatcagcagcggcaggccgctcatcatccagtgggcaaccaccttcaccagcaccaccgccaccaggggcgtcggcaggagcatcagttgctccagggaaccgtcctgccagtcgtcgcgaaacaaccgatccatcaccagcagcgccgccagcagcgcggcgacccacaccacgcccggcgcaatctgcgccagcagctgcggcgcggcgccgacgccgaacggaaacagggtgatgacgatcagaaagaaccagagcggattgaggatctccgccccgctgcgccacgccaggcgcagttcccgggccaacagcgcacgcatcattgcccgcctccagcctcgccgccgaggcgcagggtgcgcaacggacagcccagcggccgcagcggctggtgggtggtgaggatggcgcatcccccctgccgggcgtgctgctccaggcgacgggtcagggtttccatcgccgtggcgtcgagggcggtgaacggctcatcgaggatccacagcggcgcgtcggttaaccacaggcgggtgagcgccacccgacgctgctgcccggcggagagctggctcaaggggagatcttcatagcccgccagaccgacggcggcgagggcgctttcccgctgctgaaggcggctggccggaaagaagaaacgcaggttttcatcggcggtcagcgccgcgttaacgccgggtttatggcccagccacagcagctgacggtgaaatgactcccggaccttcgccagcggctggccctgccagctcaccaccccgctttccgggcgcgccaggccgcagaggatccgcagcagcgaggttttccccgcgccgttatcaccggcgacctgcagcagctcgccggcagcgagggacagcgtcagcgccgcaaacagcggtcgatcgtcaacgatgcaggtcagtcgctctgcatgcagcatgaaggcaaactccttgattcagacagtattttacgtcgtcgctaagtatgggttgcaccgcgcgggcgacgcaaccctgacggttactgtccggcctccggcagcttcgagatatcggcgttgcctaacgccttctcatcgtgcgccgcggtctccttacgcaccttcgccacatcgctggcgctgaccgccggcgcgttgttgccccagctggtgcggatgaaattgaccacatccgccacctgctggtcgtccaggcgccagccgaacgacggcatggtcaggttggagaccgcatctttcaccgccggcgtggtgctcccggtcagaacgatgtggataagcgaagtggcatcttcggtctggaccaccggattgcccttcagcgacgggaaggcgcgcttatagcctacgccgtcggtgcggtggcaggcggcgcagttatcgacgtacagcgcggcgccggttttactgtcgttacccttccacagatctttcgccacgctgtcttccaccggggctggggtctgtttgccgccgcgcggcgggagcgatttcaggtagcgggcgatggcggtgatgtcgtcatcagagagatactgcagactatgctccaccacatcgctcatgccgccgaagaccaccgatttatcgttgcgtccggttttgaggaactcggccagctcggcttcgctccaggtccccagaccgtcgcggttttcgccgcgcaggctggaggcgacccagccgtcaatcggcgcattgctgcccgccaggtaatcatcgccttcgctttcgctgagcgctttttcctgcatcgtcaggctacgcggggtatgacaggcgccgcagtggcccagaccttccaccagatagcggccgcgctcgagcaccgggtcaacctgcgggttggcgacaaagtcgctcggcgtcggggcgaagatgccgcgccagaacgccagcggccagcgcatcgacagcggccatgggatgtcggtgtccttgttggcgacattcaccggctccacgccgtgcataaagtaggcgtacatggcgcgcatgtccgcttcgctgatccgcgcgaacgagggatacggcatcgccggatagagcgtggaaccgtctttccgcacgcccttgcgcaccgcgtcgtcgaactcttcgaaggtgtacccgccaatgccgtgttctttatccggcgtgatattggtggagtagatggtgccgatcggcgtctccatcggcaaaccgccggcgaaaggtttccccgctttgccgttggtgtggcaggcgacacagtcccccgcccgcgccagatactccccctgcttaatcagattgctgtccgcaggcgcctcttcggcgaaggccgcgcagctcaatgccccaagcaccagggccgataaccattgcattttcatcatctgccttcctttatgcctgcaccaggggacccggatttttcagatactgctcacggatcgccttcgctgaccagtaggccagcgcggccaccgtgccggttgggttgtagcccagcccctgcgggaacgcggaggcgccgatgacgaagacgttatgcacgtcccagctttgcagataacggttaacggcgctggttttcggatcttcccccatcaccgccccaccgttcatatgggtggtctggtaggtggtggtatcaaagtggctgttggcgttttttgggctgccgaggatatatttcggcttcatcgctttagcgatcggcgccatcttatcgaacataaactgcgccatcttgatgtcgttttcctgccagtcgaaggtcatgcgcagcagcggctggccaaagacgtttttgtagttcggatcaagatcgaggtagttctgccgataggactggtgcgcgccgtgggcatccatcgacaggtgatgggtgtaggtatcggccaccgccgctttccacttgctgccccacgccggggtgcccggcggtaccgggaaaccggagatgggcttggtcccggcctggttgacccagaacggcgaaccgccgacaaagcccgccgcaccgtggtcgaagttgtcggcgttgaagtcgtcgacgccgacgccgttgccgcccgcaccgataaacggattggtataggtgtctttgtcgaaaatggccttgatggtggtcatgttctggtaggcgaagttacgccctaccaccccttcgccggtctccggattgtacggtttgccgatcccggagagcagcatcaggtgcacgttgtggaactggaaggcgccgataatcaccaggtccgccggctgttccatttcgcgcccctggccgtcgacgtaggtcacgccggtggcgcgggatttgtcgttggtcaggttgaccttcagcacgttggcgttagtccgcagctcaaagcgtttttcctggcgcagcgccggcagaatgttcacgttcggcgaggctttagagtacatgtagcaggcgtagccgctgcagaaaccgcaaaagttgcacgggcccatctgcgcgccgtaggggttggtataggagtcggaggtgttggccgacggcaggttataggggtgataccccacttccagcgccgctttttcaaacagctgcgccgaccaggtgtttttctgcgccggcagcgggaagtcgtccgagcggtccggggcgaaggcgttgccgccgcggcctttgccgacgaccttgcctttgatcgaccaggcggtcccggaagtaccgaatactttttccgctttatcgaagaacggttccagctcgtcgtaggtgacgccgaaatcctggatgatcatatcctgggggatgaagtttttgccgtagcgttcttcatagtggctgcgcatccgcagctcaatgggatcgacgcggaaatggacgccggaccagtgcagcccggcgccgcccacgccggtacccggcaggaaggccgccagctggcgatagggcaccgcctgttggctggtgttatgccggatggtgacggtgcttttcgacagatcctggaacagcttgcggcggatgttgtaggtcagctcatcaatcacctgcgggtaggcgccgtccggccaggtgtcgcgcatcgggccgcgctccagcgcgacgacgttgagccccgcttcggtcagctctttggccatgatcgccccaacccagccgaagccgacgatcgcgacatcggtttttttcaatacggtggccatgattacgccctctccccattaattgataccggcgggaaggggtagcgttcgccccgttcaacccagtccataaagtcggcgcgcgcgccgggaaaattaatcagcgtccagccgaccatgcctttattgccgccatggatcgggtcgctgaagaacccttcgcgggtgttttgcagcagataggtgaagaacagcgaggccggcagctgtttgaactcggctttacccgattcccacaggccgagcgcctcgtcctgttgctcgctgctcagttcagcgaaggttttatgatatttgtcctgacaccacgcctcggcgtcggcgatcccgaggttatagatctgtttgggcaccagcggcagctgataacccatctctttcggcacgtcgggattgaagggcccctgcatataccagatggagccggtggcgtaaggggtattgagctggcggtcgataaactccggcacgccggcctctttggcgccgggaccgagttcatccgccgggattaagcgagcgacggcggcgttgataaacgcccactcacgatcgttgaagaactgcggcttccagtcgctggccgccgcggtgttcccggaggctggctctgaagcgggggccgcctgcgcggtcgcgctggtggccacgccaatagcccctgctcccgcgccgccgatcaccaccgtcgggatcagcgccatcgatttcaccaggaaatcacgcctggaattgttggttttctcgctcgacatcatcacattcctgtcattgaaaattactgtttttgtcgctgacaaaaccagtgaatgtcgtgctggaaccgataccattgcgcttttaaaccgcttagcgtctggcccggcccggcaagtcggataaaacatcgccagaggcgatatcatttatagggttatcgtttggatagtagacgattctcaacgaaacgcgggaaatcggagagaaattcaccggtctgtcatcgtgagaagagtgctgccataaccttgaggcggtaaaccagcggcattcacaccgcgctgagcttacccatgcgccaaaaaagagtgacttgtatcacaaatgttattttttgtttatggtacatggcagattaaacgtctgtaaatactcgtattaggaataattaaacattttgagctgttaaaaaagttaataaccgttgttaactatcttgtatctattgtccggctagcgccttcagctggcgatatcccatccacaggagaagagaagatatgttcgatcatgtgaaattcggcgttagcgactatgccgccagcaaagcgttctttttgcaggccctggccccgcttggcgtaacgttggttggcgaaggcgaaccgagctacggcgcagagctggccggcagcggcgatgcttctctatgcctctatcaaagtgcggaaaaaccggcgccgctgcacattgcctttcgcgccgacagccgcgagcaggtcgatgccttctggcaggcagcgctggccgccggaggaaaggacaacggtgcgccggggctacggccaaactaccacgccagttactacgccgcgtttgtgattgcgccagacgggcacaatattgaagccgtgtgccatctggcggggtaacgggcggctaccgctgcggaaaaatccacacatcctccgccgggagcgtcagatggcagtgttcggcatcgcgcagcgccgttccgtaggcgcgcagcggaaagtcgtcgccttcggtacggaacaggtactcccagcggtcgccgaggtacatgctggtcagcagcggtagctggaggctgttatcctgcgctgcgccgtcgagtcgcaggcgctcgacgcggatcaccgccgtcgccggctcgccgacgctgaccccctcgcccgctcgcccccacagcgtccagctggcgccttcaaccctcgcacgaccgttttccagcgccgtcaccttaccgtgcagacggttattgctgcccataaactcggcggcgaacagcgtcgccgggctgccgtacatctcctgcggcgtcccctgttgctcaatgacgccattgttcagcagcagaatacgatcggagatggccattgcttcattctgatcgtgggtgaccatcagcgccgacaggcccagcttaatgatcagctcgcgcagaaacacccgcgcctcttcgcgcagcttggcgtcaaggttggagagcggttcatccagcaggatcaccggcgggttgtaaaccagcgcccgaccgatggccacccgctgctgctggccaccggagagctggtgcggatggcggttgccaaggtgccccagccccagctgatccagcacacgctgcacccgctcttttatctccccggcggccactttacgcagcttcagcggataggccacattgtcgaacaccgttttgtgcggccacagggcataggactggaacaccaggccgaggttacgctcttcggccgggatctcgctgcgcggcgtgccgtcgtacaccgtgcggttgccgatggcgatccgtccgctcgtcggtttttccagcccggccaccgcccgcagtagcgtggttttcccacttcccgaaggccccagcaacgacaccacctctccccggccaagcgtcatggaaacccccttcagcaccgggttgtcgccataggtgagatgcagattttctaccgataactcaatcatgtaatttcactccaaagcgcagggcgatacccaggccaatcaccaccagcagaatattgataaaggagagcgccgcgacgatatcgatggcccccgccgcccacagcgacaccagcatcgagccgatggtttcggtacccggcgacagcagatagacgccggtggaatactcgcgctcaaagatcaggaacatcagcagccaggagccaatcagcccatagcgcgacagcggaacggtcacgtggcgggtgatctgcccccgcgaggcgccggtgctacgcgccgcctcctccagctccgggcccacctgcagcagcgtcgaggagatgagccgcaggccgtaggccatccacaccacggtgtaggccagccagacgctgaagatggtgttgcgcagggcgcgcagctgcacgataaggtgctcccgcagccagtcggccaccggcagcgccgagagccagccgtgcttcagcgactgatcgagccacatcggcacaaacaggaatacccacaggaatgccagcccggccagcagccccggtacagcgcgcgggaccagcacgctgtagtcgagaaagcgggtgacgttgtccgctttgcggtgcatggcgatgccgacaaacagatagcagatcaccgccagcgcgccgccgatgatgccgatagccatcgagttgacgatcgcccgcagcaggttgggctgctgccagatattgtggaacgtcgccagcgacagctcatcccacagcgacacgccgacgccccagttggagataaaagcgcgcagcgccacgccgagcagcggtacgccgatggtcaccgtcagccaggccactaccaccgccccggcgacccagcgccatttgcccagcggcagcgcccgcgcctgggacgccttgcccttcatggtgacaaagcggttggcggtgcgcatcagccgccgctggagcatcaccagcgggatggtgatgcagatcagcactaccgccaccgccgccatcagatggtaggagggggtgccgagcttgttagtcagcttgtagagataggtcgccagcaccatgttgccctcggggtcgcccagcaccagcatcagaccgaagacttccagaccgaggaaaaagagcaacacgcaggcgtaaagaatggatggccgcaccatcggcagactcaccgaggtcatcacctgcagcggcgtggcgccgacggtgcgcgccgcctcttccacgtcggagccgacgctgcgcagcgccgaagagatatagagataggcatgcggaacgtgagttaagccggcgatgaccacaatgctgaacatcgagtagatattccacggcacaaagccgatcagctgctgcgcccactgggaaaagaagcctaccggcccggcggccaccacgtagccaaagcccagcaccatcggcgagacgaagatcggcaccaaaatcagcggctcaatgatccgccggccgggtaaatcggtgcgcaccatcagaaacgccaaaataccgcccagcggaatggcgataatcaccaggccaaaggccagaataaaacctgaccttaatgccagataaaaatccgggtcggtaaaaataaaggcgaaggcttccagactccacgatttggagcgggaaaagaacggtgccgaaagaaaactctgcaccacaataaataacagcgggacataaatcaccagcgccgtgatgcacaccaccacgccgcgcggcagcccctgccactttctgcgtaatacgttcatggttcatcccttcggtcaggtgaataaacccgccgggtgtgaataggggcatcggcgatgcccctgaggaggattatttcgcggcggcgctgcgccattgtttaataaactgcagacgtttttgcggctgtaaataatcgagcagcgtttcgttgaccgggatcggttttaacgctttgcccagcagcgcggtcataccatcgatatcatttttacctgcaatatcgcgacgaattgagggaatatccgcctggctggcgaggatctgctggcctttttccgacaagacatagtcgagccacaattttgccgcattgggatgttcgctctcctggctaataaacgagacgcgggagagcaccagcacgtaatctttcggataggcaatacctaaagagggatcgtttttcgcccgcgcttcggcataagagccaagaatgttatagccgatcaggttttcgccggaggagacgcgctccatcattgtgccggtggaagactgcaccgtcaggccgcctttggcgatattcgccaggtcggcaaaatagttcgcgtcggcctggctgtcctgtaccgccagcataaagccgaggcccgatttttcgatatcgtaggtggtgactttgcctttaaatttatcggcctggctggcgataagttttgccagcgcggtatgcgaatccggaacctcattctgcgggatcagccgtttgttatagataaacaccaccggctcataggtagtgccataggctttttgctgccagaccgcccagtcgggtaattgcttcacctccggcgaggcatattgttccgcgtattcggtggctaatttcagcgcggtatccatcgatgagctccacaccacatccccgctgccgcccccggcggcctgttcgctgatatagcggttatacagctcggtactgttcatgtcgttatattcgactttgacgcctgggtattgcgcttcaaatcccttaattaacggcccggccgctttggtatcggtcgtggaatagaccaccaccttgccctcttttacggcggcatcaatcgttttttgataatccgcgggatagcccgcaggcacctccgcccaggcggcacaggcgaaaacggccgtcagtgaaaccactaaaccacttattttcttatacatgataccaacctttaatcatcaattaataaacacaaatttaacatatagtggtatcagctccccttgcaacgacggggatggcttttttctggcttttgtgacactggcagaatttaaaaatgtggtgtttatggcgttaattaaaacgcgatcccggcccggttttttatcgtgtgtcgtatacgcaggcgctggcgcagcggcatgtcgccgggagacgccgcccttgaccttctgcgccgggcggcgcagcataaaacggcaaacataacaaaataacaacagactacaggagagaatcagtgcctacaggacaccgctttctggcgacggatctgcatcagtttgtcgtctcactgtttacccatctcggcagtaccccaggggaagccaccctcgtcgcggaccatctgatcgccgccaatcttgccgggcatgactcccacggcgtcgggatgatccccagctacgtcaaatcccacgccggtggttttctgcagctcaaccgccacgccacggtgaccaaagacgccggcgccgtggtcaccctcgacggcaacgccggcttcggccaggtggtcgcccacgaagcgatgcagttaggcattgaaaaggcgaagcagcacggtatggcggctatcgccctgcgcaatgcgcatcacgtcggacgcatcggctactgggccgaacagtgcgccgccgccgggctgatctccattcacttcgtcagcgtcatcggcgacccgatggtcgccccgttccgcgggaaggacagccgcttcggcaccaacccgctgtgcgtggtgtttccccgcgcgggccatccgccgctgctgctggactacgccaccagcgccatcgcctttggtaaaacccgcgtcgcctggcataaaggcgaagccgtggcccccggctgcctgattgacgccgagggtcgacccactaccgacccggcggtgatgcagacctcgccgctgggcgccctgctcaccttcgcccagcacaaaggctatgccctggcgacgctgtgcgaagtgctcggcggcgcgctctccggcgggcaaaccacccatcaggagagcctgcagaccagcgtcgacgccatctttaactgcatgaccacggtgatcctgcgcccggacgcgttcgatgccccggacagccaggcgcagacggaggcctttatcgcatggtgtaagcagtcgccgcacgatgccgatgccccggtgctggcgcccggcgaatgggaggccgccaaccgcgaagcgcggctggcgcaggggatcccgctggatgccggcagctggcaggctatctgcgccgccgcgcgcgacgtcggcctgagcgaatcgcacttcgaccgctgccgccctctcgcctagccgcgttttactcccgcagagcgtctgacgtcggcgctctgcgtcatcgtcattagtgacgaggtcatgctcccgtcatcaatctcttttcatttttcaatacagatcaagagtttaaattctggcacaagacctgcatagcgcaacaggcctgcgtctgcatcaccaccaggcgataccgcgatcgttgcccgtcgggcccggcgcgacagcgatcctcagttcactgttaacaggtctgttactgatgaaaaaaatcacgagcgtgtgcccctactgcggggcgggttgcaaacttaaactggttgtcgacaacaataaaatcattcgcgcggaggccgccgacggcgtcaccaaccagaaccagctgtgcctgaaaggctactacggctgggattttcttaacgatacgcagctcctgacgccccgtcttaaacaaccgatgatccgctaccagaaaggcggcgccttcacgccggtcagctggcaggaggcgattcgctataccgccagcaagctcagggagatcaaagagaagcatggcccacgtgccatcatgaccaccggctcctcgcgcggcaccggcaacgaaaccaactatgtgatgcaaaagttcgcccgcgcggtgctgaacaccaataacgtcgactgctgcgcccgcgtctgccacggcccctccgtcgccgggctacagcaggcgctgggcaacggggcgatgagcaactcgattagcgacatcgaaaactcgaagtgcctgctggtttttggctacaactgcgccgactcccatcccatcgtcgcccgccgggtaatcaaggcccgggacaacggcgccaaaatcattgtctgcgatccgcggcgcattgaaaccgcgcgcattgccgatcgtcatctgcagctcaacaacggcagcaacatggcgctggtaaatgccttcggctatgtgctgctggaggaggagctgtacaacaaaacctatgtcgaacgctataccgaagggctggatgcttaccgcgaggcggtgaaggattacgccccggaagcggtggaagggattgtcggggtcagcgcgcgggaaatccgggaggcgatgcgcatgttcgccgccgccccatccgccaccatcatgtggggcatgggggtcactcagtttggccaggcggtggacgtggtgcgcggcctggcaagcctggcgctgctcaccggcaacctgggacggcccaacgtcggcgtggggccggtccgcgggcaaaacaacgtacagggcgcctgcgatatgggcgtgctgccgaacctgtttcccggctatcaggaggtcaccgaccccgccgtgcgggcgaaattcgccgccgcctggggcatcgacccggcgctgatggacgaccaggtcggcacccgcatcaccgaggtgccgcataaagcgctgaccggcgagatcaaagcctattatattatgggcgaagatccgctgcagaccgaagccgacctcggcctggtgcgcaaaggcatcgaggcgctggactttgtcgtcgtgcaggacatcttcatgaccaaaacagcggaaatggccgatgtcctgctgccggccacctcctggggcgagcacggcggcgtcttcacctgcgccgaccgcgggttccagcggtttgaacaggcgatccctccggcggggaatgtgaagcgcgactgggagatcatcagcctgctggccagcgaattgggctatccgatgcactatgagaacaaccagcagatctgggacgagatgcgcgagctctgcccgctgttctacggcgtgacctgggagaaaatgggcgatatgggccatgtccagtggccgtgcccgaccctcgatcatcccggcacgccgtggctgtatcaagacaaccgcttcgacaccccctcgggtaaagggcagctgttcgccaccgcctggcgcgcgccggcggagcgcccggatgacgagtggccgctggtgctctgcaccgtgcgggaagtcgggcattattcctgccgctcgatgaccggcaactgcgccgcgctgcagtcgctggctgacgagccgggacgggtgcagatgaatcctgcggatgcgcaacgactggggatcaccgacaaacagctggtgtgggtcagctcccggcgcgggaaggtgatctcccgcgccgacctcagcgatcgcatcaatccgggggcggtctatatgacctatcagtggtgggtgggcgcctgcaatgagctgacccaggataacctcgatccgatctccaaaacgccggaaaccaaatactgtgcggtgaaagtggaagcgattgccgaccagcaatgggcggagcgctatgcctggacggcctacagcgacatgaaagcgcgactgaaagccgctgccgacgtctgacctcagggagcgcagcgcgctccctctgccgctgccggtgggttacgccgccggcagctgtttctccaccagccccacccacatggcgacgccggggccgatcagcgcatcgttaaagtcatagctggcgttatgcagcggcttcgacggggtttcgccgtcggtgcctatccagaaataggcccccggacaggcctccagcatgcaggcaaaatcttcggaggccatcgacggcgcctgattccagcgcaccgcttgcgcgccgagagtggcgacggccacctcgcgcacctgctgcgcctgcagcgcatggtttttggtcaccggataacccgggaaccagctaatctcgccctgcacatcggacacctgcggctgggtcgccacatagctttcgatgagctcccgcacgcgggcgcgaacgcgattgctcagacagcggaaggtaccgcgcagcaccacggtgtccggcaggacgttgatcgcctcgccgccgtttatctgggtgatgctgaccaccgcggaatcctgcggcgacaagcggcgggaaggaatggtctgcagcgccattatcagttgcgccgccgcgacgatcggatcggccccgctctccggcatcgccgcatgacagctctttccgcgcagggtgatctcgaaggcgtccagcgaggccatcatcgcgccatcgctgagcgccacttcgccaagagggatccccggccagttatgcagcgcgtagatggcgtccatcgggaagcgctcaaacaacccctcctccaccattttgcgcgcaccgccgaggttctcttccgccggctgaaagacaaagtggacggtgccgctgaaatggcgggtctgcgccagatgggcggcggccgccagcagcatcgcggtatggccatcgtggccgcaggcgtgcatcaccccgggacggcgtgaacggtagctgacgctccccagctcggtgattggcagggcgtccatatcggcgcgcaggccgataaccggcccggggccgttctccagcgtcgccacgacgccggtgccggccagcccgcgatgcacctgcagcccaaacgaggccagtagctccgcaacgcggcgcgaggtctcctgttcctgatatccgagctcaggcgcggcgtgaaattcacgtcgccagccaacggcttcggcgatcagtgacggcgatacggccatgtattactcctttcctgcatagcgtaatgctgaataatcggtcatgcgtcgcgtttttccccgtcgctcaccggcgtcggggcgctgccgctccctccgttatatcctgtcgttaccacgctgacaacgtcacgaaatgcggcggcggcgcggcgtacagcccacctgccgccctgcggcccttttttggtagtgatttcaacggtgacaacggccagtcgattaattattatgcaactcaggacggcaatttgccgaaggatccactactgacctctccgtcatcggaaataaaatgtttaacccagaccagaatcgtcttgcccccacgctggcgatgatcatggccgcgtcgcttgtgggatttatcaccggctatacggtgccgttaatcagtcttgagctggcgcagcagcagatcgcgccgctgtacgtcggcctgctggccgctctgccgcccgccggcatgatgatctcctctttcctctctcctgcgctgtgccggcgcattgaaatgggcgtgctgctgagcggcagtctgatcctgctggcgctggcgaccatcgcctcatgcatgactaccgatatgacgctgcttttgctgccgcgcctgctgaccggcctggcctccggggtcattatcgtactcggcgaaagctggatcaccggcggcgcggcgggcagccagcgcgctaccctcaccggtctctacgcctcggcctttaccggctgccagctggccgggccgctgctgatctccgtcggccccgcctggcagacatcagcgctgatcgcgattgtcgcggtcaccgccgtctgcctgctgatgctgcgccatctgcccaccggcactcgtgaaagcctcggggagcgcgccagctggcgcagcctcggcgcctttctgccggtactggcctccggggtcttctgcttcgccttctttgacgccagcatcctcgccctgctgccgctgtacggcatggacaaagggctgaatgaagggctggcggtgctgctggtcaccgtggtgctgaccggagatgcgatgttccagaccccgctcggctggctggccgaccgggtcgggattcgccgcgtgcatctgagctgcgcggtggttttcagcctgtcgctgctggccctgccgctgatgctcggctcgcgcattcagctgatggccatttgtctgctgctgggcgccgcggcgggcgcactttataccctgtcgctggtgcgggcggggaaaaccttcaatgggcagaagctgattatgattaacgccctgttcggctttttctggtccgccggcagcgttgccgggccggtagtcagcggcatgctgatcggcatcactggttacgatggcctgatcgtcaccctggtggccagcggcgtgctgttcctgttgattcagtgtctgtgcaaaaacgagaaaaccctgcttgccagtgagcaggaagatgacatggacgaggcgacggagtccgcacggtagtcctcacgggctggcctggcgccagcccttttttatggccctcaccggagggtatcctgttcttgctggctcactgctgttaaccattgccggccccccagccgagaggaaatcccatggaaagtaataccttacatcgtggcagattgatcgatcatattctgctggttgtcgaagactttgaggcaagcaaaaacttctataccgccgtactgtcggcgctggagatcccggttatcaccacctccaacgaatacttgctggccgacgaactggtggtggcctcacgccacagcccggaggctgccgggaaactgactgggcgccaccacctggcattccaggccagagatcgtgacatggtggacgctttttaccatgcggcactgacccatggcggacgtgataacggcgcgcctggcgaacgacactatcatcctggttactatgccgcttttgtgctggatccgcaggggaataatattgaggtggtgtaccatggcaaggctgagcgcagcgccgggtctgttgcgatcagcttcacgcagtaagcgggcgaaagtcacattttcttacctgcgcaattcccataataaatgtgggtgttatcatttccttgataaataattcatacccatagctgaggcgtcgatgctggaaaacctaatcatctgataatcagacttccgaccatcactggccggactgattatcactgcgctgaaatcgaatgcggacactggcgagtgttcgcctattttgcccatgatgatgacacaggtttcccggtatgaatgtttcccctcaggagcaagcgactttattcattctcgtcccctgcggacaaacgctccacatccacgcgatggcagcgagacccctccctcgcataagaaacgtcacccccagccagttaacccggtgcgttatccctctgccatgctcgatcactccctctgcatgccgttgcgttgccttacccaatgaccgtcgtcaggcgaattttatctttcgatttgtcattccgcggccagcctgtgacgacagtcgcaagggatccacatcaaccaggccccgataccagggaaaccgtcaccgaccagggagtcttcgcgtatgaaattagcgttgggaccgtacatccgttttagcagaatcttgttatttccgctggcgatggttatctatgatttttctgcttatctgactaccgatctcattcagccgggtattatccacatcatccgggaatttgaggctgatgttgcgttagccccggcctctgtcagcctctatttagccgggggctggcattacagtggctgctggggccgctctccgaccgcattggtcgccgccccgtactactgaccggagccatcatctttgctttggcctgcttcagcatgatctttgtcacgtcgattgatcaatatcttatcgcccgttttatccagggaaccagtatctgcttcatttcgacagtcggttatgtctccatccaggaggcttttgatgaaaaagagtctatccgcattatggcggcgctgacatccatcgttttgctggcgccggtaatcgggcccctggcgggcgctggcctgatgaatttcctgcactggaagttattgtttgcgatcatcggcgccatgagcttgctggcctgggcgttactgatttttaacatgccagaaacggtcacctctcagggccgggggtttcgtccgggagaggtattttccgagtttgtccgcgcctttaaacagccggtggtgctcacgggcgcgctggccttgtcattcagtaacctgccgataatcacctgggtagcactctctccggtgatcctgatcgatgacggcgggatgtcgcgcggcgtctatgcctggacccaggtgcctgtctttggcggcgttattattgccagcatcatagtggcccgttttatcaaggatccgacctctccccgctttatctggcgcactatcccgatacagctgaccgggttgttggtattactggcgggaaatattgcatggccccatacctggtggtggtccgtttcaggaacgagtctctatgccctcggaacaggcctgttgttccccgtattattccgttttgcgcttttttcccactccctgccgaaagggacggtttcagccaccatcaacattgtggcgctcagttttatggcggcctcggtggaagtagcgcgctgggtttacttccaggctggcggcagaattgcttttcactgcctggcgctgatagcgggaatcgtcgtcatcatgctggtctcgcgcttgttaaaactccgtcagcaacatctccttcagccagcctgaaggtttaggcctttttgcccgcaacaggagaacactatgttttcatacattatgctgggaacgaacgatctgccacgcgccatcaagttctatgacccgttaatggcgctgctggggcacgtcaaagccggccgtaacgaacagggggcgtcctggggcacctacaacggcaatcacacctgcgggctgtgcgtgggcgttccttttgaccaacagcctgccggggtgggtaatggaacgatggtggcgcttaacgcccgctccgtcgcacatattgcggaactgcatgccctcgccctgcaactcggcggacgtgatgaaggcggtcccggtcaccggccgcagtatggcgacggttttcacagcgcctacgtccgcgatcccgacggcaataagctggcgtttgtttactatgcgtctgcagattgaatggctgcagcggaggtggcttttgcaggcggagaaaagggtgtcaggacggccaacttcgccgtccttattcaccgaggaataaaaaagccagcagctcaagcgctgcggcttatcttcccggcaagttatctaccgcaaagtgataacgtaatccggcgtcgcgcatacagcgtttccgccgccagctgaaaatcatattccatcgccttcagctttttcgtcttgagctgttttagtgaaataccctcgatatgccctgtcgcgaccaaccaccggatttcagccgtactcagcttgagctgttttttcagtattgatagcaggctgatgcgaaatggctgactgactctgacgcgcaccgttatccgctgacatgccatcaacgtaaccgaccattgctcgtgaatacgaaaatcaggttgccccgacggctcggcgcggttgcgcttcagcgtcgcgaggtcagcggcataatagtgaaccatggctgcatcgttctgcagcaggcgctgaagcagttcacggtttatcttgctgacgtgctgcctggaaaacagggcgatattccaggtgtaatcgcagcgcgtgcatttatagatgctccagatatccagcagcttcttttgcgaattcacccggatggcgccggaaggcgcgaagtcgcgttttacattgcaggcggggcagcgtttggcaatgtgctgataccccacgggcgtgaccgtccatgtaactgtcataacgtaccttttttaacccatacgaaaccgagtccgtcattaacggaccatgatttttggcgtatgaaaaatagttaatcgctatttttcagtgggttaaaaaaagatttccaacgttattttcctggagaagtcctaatcgacaccctgagattaacaaaggggttatcgcgggatatatgagcccagtcaatgtttgcgcggatgattaaaagcttcgtcaatacacccggaatgctcagcgggctggcatcgcgccagcccgcccggtttacagcaccttgctgaggaacgcggcggtgcgtgggttggtcggcgcgctaaagatctgccccggcttgccctcttcctgaatcacgccctggtcgatgaagatcacccggtcggccacttcgcgggcaaagcccatttcgtgggtcacgatcaccatggtcatcccctcgctggcgaggtttttcatcacctccagcacgtcgcccaccagctccggatccagcgccgaagtgggctcatcgaacagcattatcgacggcttcatcgccagcgcgcgggcgatggctacccgctgctgctggccgccggacaggctcgagggccaggcgtcgcgcttatcgcttaagcccaccttcgccagcaaggcttccgccaggtcgaccgcctgctggcgcggcatattgcgcagattcatcggcgccatgatcaggttttccagcaccgtcatgtgcgggaacaggttaaagcgctggaacaccatgccgacgctttcgcgcatcttgttgaggtcggtggtccggtcgtgggcggcaaagccgttaaccaccacctcgccttcgctgaccgtctccagggcgttcatgcagcgcaggaaggtgcttttccccgagccggatgggccgatgatgcacaccacttcctgcggtttaatatcgcagctgatgccgcgcagcacgtggctgtcgccgaagcgcttatgtaagttattaatgtgaatcacttttgccaaacctcttttccagacggttaaccagctgcgccagcaggaaggtgatcacccagtagaccagagagatggtcaggtagggttcccagtaggtggcgtaggcgccggagacggtgcgcgcggcataggccagatcggccaggccgatcgccgaggccagcgacgagtctttgacaatggcgatggcgttattgcccagcggcggcagaatgcggcgaaacgcctgcggcaggatcaccttgcgcatggttttccaccacggcatgcccagcgcgcgggaggcctccatctgccctttgtcgatcgactggatgccggcgcggaaaatctccgacacataggctccggcgttaagggtgatcgccacgatgcaggagaggaacgccccgtagctggcgcgcagttcgcgggcaaagtcggcgctcatcaggccgctggtcaccagcaggccgtcgcgcggattgataaacagcggcaccagcgcaaagtgcaccaccataatctgcacgaacagcggcgtgccgcggaaggcgctgacgtaaaagcgcaccggaaactgcaccaggtagcggagaatatatttccacggcccgtgctcggccttcgccatccgcccgagaccgagagttaacccccacagcgtcccgaggatcacgcagataatggtacatttaatcgtcatcagggcgccgtccacaaacagcgggccgtactcctcgatgatctcccaacggaatcccgtcatagtccttccctaaaaaatacggctatcgcctgggcgatagccgtggtcactgaaaaaggtggattattgcgctggcagcgtcggcacgttgtcgtcgaaccaggttttatagattttggcgtaagtcccgtcagcaacgatcttttgcagcccggcgttgattttgcccagcagttcactgttgcctttcgccaccgcaataccgaaatactgacgctcaaatttggcatccggcaccagcttgaactgcttctccgggtgctgtttgatgtagtacttcaccaccccgacgtcgcctaccgcggcgctgacgccgtcctcaaacagctcctggagcatcagcggggtattgtcgaagcgcttgatcgcggtgctgtttttacccagcacctcagaaaccacgatatcgccggtgctggagttcaccaccccgaccttctcgtttttcagggccgccagtgaatccacctgcgagtcctgagcgacgacgatagactgttcggccgggaagtacggcgcggagaaatcgaccatctgtttgcgtttatcggtgatggtgatcccggagatgatgatgtcgcggtcgccggtgttcagcgtggcgaagatgccttcccatggggtattgaccagcttaacgtcaaagccttcggctttggcgatggctttgatgatgtcgatgtcgaaaccttccagctgtttctggctgttttcaaattcaaacggccggtaggtgccgccggagccgacggtataggtttccgcagccgcctgtccggcagccgtcagcgcggctatcatgcaacacgctttgagcaaattcttgaccatgagatttcctttttatgcatttattttgcataaaaatacacacactcacttttatatgcaaccggaaaccttcccgctggtgaattatcttctcaatggccccgtttaccgccggatttaccgatagcccgatgcagatcgttgattcgtttcagggatttcaccgttttttgtggcgtggtagaggccaccgacaggacaattatctcgagacagaccagcaccgtaccgtgcagcggcatccggctactgtccccgccgcgcgggacgtcgatcaccacctgcgcctcctggctgaagcgcgagtccaccgcctgggtcagcaggatggtcggaatacccagccgcttcgcctcgcgcagggtggtcaacccttcgcgatggggggatttttgccccatcatgatcagcacatcgccgcgctgcaggccgataagctgttcggcaaggctaaagcccgtgcggttcatcacgtacgccggcaggccaatacggctgaacaaccgggcggtgtattcggcgaggatccccgaggcgccgataccgaagatccccacctggcgcgcgtcgctgagcaataccaccgcctgagccaccgccgcgcggttgtcggcccgcgacaggacctcgcatacccgctgatggccttcaagcacaaaatcaatactggagttgacgtcgctggagagcgcggtaaccgtcgagcgcatcttttccgccgaggtgaccgaggtgccgaaccagcgctccatggtctgcttaagctcgcgcagcccggcgaagcccagcgcctggatggcacgcaccaccgtggcgtcggaggtctgggtcgcggtggcgatctccatcgccgtatgctccagcaccacctcgcggttgtcgttgatatagctgaccaccgcccgcagccggggggagagctggtgcgcccgggcgcgatagcgttcgccgaacagatcgactttgcccttctctttttttaccgcgcttttcatttggcctccgccgggatcggcctgccggcaatatgcgactgcacctgggccaccatcagggacagcgcggcgtaggagttagagatcacctcttcccgcggcagcaaaatatagtgcccggtgcggcaggcgcgcataaagtcgcaccagccgggcatcacgccttccatcgcctgcagctcatcctgcggcttaccgccggtatccgaccgccaggtggcgaagacaaaatcagcgtctagctccggcagctgttccgcgctgacgtcaatgcgctgaccatcggggatccgctcaatcagcggcggaaagcggaacccggcgtcgcgcagcacccggcccagcgcatgatacgaatgatgcaccgtgaccttgccgttgttcgcctggatcactgagacgctgtactgcggtgggttgaccatcgctttcagctgcttgatttgctcctgatagcggcgctcgaggatcgccagccgcggctgggtgccggtcagctgcgccagcttgcggtaaatctccggggcgctgccctgcagatggtcgatgctcaccgtcggggcaatcttctccagttgctctaccgacacatggcggctgggctcagtgatgattagatccggcctggcggcggctaccgcttccagatcgatatcggcggtgccaataaagcggatatcgctgttgtcgatatcgacgccggtgagctgggcgctggatcgcaggtagtggctgccgtccgggcgcgtccggccgtggctggcgatcggcggcgccccgagctcaatcagcggaatggtaatgtcgagatcgtgcatcgaaacgatacgctgcggatgcagcggcacggtgaccgtgcggcctaaatcatcggtgaaagtttgagtttgtggggcggcggcgctgacggcccccgtcagcaacagcagcaatgagacgaaccaacgcatactaccttcctggttaaagggcatcacggcgacgccagagcaagataacgaagaacgggcaccccaccagggcaatgacaatccccgccgggatctgcagcggggcaaacgccagccggccaagggtatcggtcgccagcaccagcaaggcgccaatcagcgcgctgccccacagcagcgatacctggccgccgcgcagcacaaaacgcgccatatgcggcgccatcaggcccacaaaacccaggctgccgacgcaggagacgctggccgaggtcagcagcaccggcgcaaaaaagcgcagcaccgtcagctgctgcagacgtacgccgaggccgatggcggtccggtcgcccagcagcgccacgtccgccgcccgggcggtacagaacaggatgatggccccgggcagcgcccagcaaaaagccaccgccagcagcggccaggtggcggcctgcaggctgcccgccagccagatcatcgccgtctgcacgtcgcgtacgtcggcggtggtcataaagatgccgaccgcggccgccaggctccaggagacgccgatgccaattaaaataaagcgcggccgcgaacagtcgcgggccagcgtcaggaccagcagggccaccgctatgccgccgaccatccccgccagcggccgccagaccaggcctaccgccgggaaaaacagcaccagcgccagaaccacgatgcttgccccctctttgacgccgatcagccccgggtcggccagcccgttacgggtgatgctctgcatcgccgcgccggccagccccagcatggccccgcacagcagcgccatcaggatccgcggcaggcggatatcaaacagaataaagcgcggctgctcgcccatctcctggggcgccagcagggctcgcgccagcgtcgacgcgggcagcggatagctgccgcggctaaggctgtacagccccagcgccagcagcgtcagcactatgctggcggcaatttttaacgccgcaggacgcagcagcagatgacgggaggcgaaagccagcggccgaaaaccggcccggtgaacggcgcgcgtcatttaaaaaacctcgcggcgataaagataaacaacggcgcgcccaccagggcggtcatcgctccggtggccagctcctgcggcgcgaccagcgtccgggcggcgatatccgccagcaccagcgccagcgctcccaccggcgcggccaggggcagcgccaggcggatgtcttccgtcaccagacggcgcaccatgtgcggcaccaccagcccgacgaagccgatcggcccggccaccgccaccgccgcgccgcacagcagcgcaatcgccagcaggcccagcagccgggtctggacgagattaacgccaaggcccagcgccaccttatcccccagcgccagcacgttgaggcgtggggcaatgagcagcgcgacgccaaggccgatcagcgctggaaccagcgccgtctgcagcgtgctccagttcagtccggccaggtcgccggccagccaggtgcgcatcgccagcagcgtctgttcatcgagaattaatatcgccgccgtcaccgccgacgcaaaccctgacagcgccactccgcacaatgtgatgcgcagcggcgtcgccccgccgcgcccggcagaggccagcgccatcacgccaccgaacagcagccccgcgccgcaggcggcggtcagcgggcgcccggcggggaaagcgccgaaggacaggcccagcgccgaggtcgccaccaccgccagcgaggcgccggcgttaagcccgagaatatgcggctcgccaagcgggttacggatcaccgtctgcagcagcagcccggcgacgccgagcgccgcgccggtcagcagcgccgccgccagccgcaccagacgcagatcgacgataatccgctgctcaaagttacgcggatcgtactccagcagcgctcgcagcaccgtctgcggggcgatccagcgggcgcctaagccaagatgcaccagcgaggcggcgataagcagcagcgttagcagaagcagcgccagcagggggcggtggcgacgccgcgcggaaagcaggatggccacgctcattgtgccgctgcctggcggtcgcgaaacggcataaagaagggtttgccggtttgcgggttgatcgacatctgcacgtcaacgtcaaacacgcgtttaatcagctcagggctacagacatcgttgtcgctaatcgtgccggcgatgcgcccctgtttaaggaataccagcagatcggcgtagttcaccgcaaagttaaggtcatggagcactgtcaccaccgtgcggccatgttcgcgggtgagggtctggagcagctcaaggatatcgacctgatagcgcagatcgagccaggtggtcggctcatcgagcagaatggtggccgtttgctgggccagcgccatggcgatccagcagcgctgacgctggccgccggagaggctgtccaccggcagatgggcgaattcggcggtaccggttaagcgcagcgcctcctctaccgccagctcatcggcctcggaccactggcgcatcagcccctgccacgggtagcgcccgcgcgagaccagctcgaaaacggtcaatccttccggggtcaacggcgattgcgggaggatgcccagctggcgcgagacggctttcgtcggcatctggtgaatggcttgcccgtccagacgcacgcagccgccgagcggtttcagcattctggcgatggtcgagagcagcgtggatttgccggatccgttcgccccggccagcaccgtcattttgccggtgggaatggtcaggttgatatcgtcaacgatcagggtctggccgtagccggccgacagggcatccagtacgatcccctgctctgcaggtttcacccgctgtggcataactcgctcctgcgccgcagcgttccagacgatagctggacattctgcagttaaatcaaaataaatctcattctcttttgatcatgacggggatgaatgtagtagtcaatactcgccatcgtcttcagacggggacgctgactacagcgaggctgtgccaacgcaatataatttaaataaaataatatcagatagataactacagaacattccctactggaggtgtttaaaacgtcctgttcctcgccgctgaatttttatcttgcataacgtttactactacatcccttcatgattgaatgattctcaattacacatctgaaggcgcattcagacgctaaacagagtgcttttattattcagggcaatgattttattggcttaatctgaccgcaaaggcagattcgttcacgagaaacagataatgactcaaccccatgtcgcctgcaggacgttgccagggcgcgcgcttttttcgcttctttttttagcctcaccgggattaatggccgccgacaatcgcgcggcgaaaagtactaacgacgcggaagagactatcaccgtagtggccgacggcgcgcagcaaagcgccaccagcggctatcagccgctcagctccgccaccgcgacgctaacctcgatgccgctgttggatattccccaggtggtcaataccgtcagcgatcgggttctcgaagatcagcacgccacctcactcgatgaggcgctgtataacgtcgctaacgtggtgcagaccaacaccctcggcggtacccaggacgcctttacccgccgcggcttcggcgccaaccgcgacggctcgatcatgaccaacggcctgcgcaccgtgctgccgcgcagctttaacgccgccaccgaacgggtggaagtcctgaaggggcccgcctcgacgctgtacggtatcctcgaccccggcgggctgatcaacgtcatcactaaacggccggagcggcagttctccggttcggtttccgggacctccaccagctttggcggcggcaccggcagtttcgacgtcaccggccccatcgaaggcacaaatctggcgtaccgactgatcggcgaatatcagaatgaggattactggcgcaatttcggtaaaaacaaaagcagctttatcgccccttccctgacctggtttggcgagcgggcaacggtgaccgcgtcctattcgcaccgcgactacagcgcgccctttgatcgcggcactatcttcgatctgaataccggccatgcggtgaacgtcgatcgcaaaacccgcttcgatgaagcgtttaatattaccgatggctattccgatctcgctcagctcaacgccgagtatcgccttaacgacgcctggaccgcgcgcttcgattacagctacagccaggatcactataacgataaccaggcgcgggtgatggcctatgattcggcgaccggcaacctcacccgccgggtcgatggtacccacggttcaacgcagaagatgcactccacccgcgccgacctgcagggcaacgtggtagtgggcggcttttataacgagctgctgaccggcgtcgcctatgagaattacgatctgctgcgcaccgatatgctgcgctgtaagaacgttaaaggctttaacatctatcatccggtctacggcactctcgacacctgtaataccgtctccgcctccgacagcgaccagcgcattcagcaggagagctatgccgcatacgtgcaggacgcgctgtacctgaccgacaactggatcgccgtcgccggcgtgcgctaccagtactacacccagtacgccggtaaaggccgaccgtttaacgtcaataccgacagccgcgacgagaattggacgccgaaagccggcctggtctacaaggtcacgccgaacgtctctctgttcgccaacgtcgcccagtcgtttatgccgcagtcgtcgatcgccagctatatcggcgagctgccgccggaagagtccacctcttacgaagtgggcgccaaatttgacctgttaaacggcattaccgccaatatcgcgctgtttgatattcataagcgtaacgtgctgtacaccgagagcattggcgatgagacggtggccaaaacggcgggcaaagtgcgttcccagggcgtggaagtggatctggcggggtccatcaccgataacctcagcgtgatcgccagctacggctacaccgacgccaaagtgctggaagatccggattacgccgggaaaccgctgccaaacgtaccgaaacataccggttcgctgttcctgacctatgatattcataacgtctataacagcaataccctgaccgtcggcggcggcggccatgcggtcagcaagcgttccggcaccaacggcgcggattattatctgcaggggtatgcggtggcggatgtgtttgccgcctataagatgaagctgcagtatccggtgacgctgcaggtgaatgtgaagaacctgtttgataagacctattacacttcctcgatcggcaccaataacctcggcaaccagattggcgacccgcgcgaagtgcagttcacggtgaagatggatttttaagccggaccatggcgtcgcgccggatattcattgccgggcggcgctgcgcttgcaccggcctacctttccgtgacatttgtcgcagttcgtaggcccggcaaggcgcagccgccaccgggcaaaaacaggcgtctggcaccggatgcccattgccgggcggcgctgcgcttgcgccggcctagtttccgtgacatttgtcgcagttcgtaggctcggtaaggcgcagccgccaccgggcaaaaacaggcgcctggcgccggatgcccattgccgggcggcgctgcgcttgcgccggcctacctttccgtgacatttgtcgcagttcgtaggcccggtaaggcgcagccgccaccgggcaaaaacaggcgcctggcgccggatgcccattgccgggcggcgctgcgcttgcgccggcctacctttccgtgacatttgtcgcagcgccaccggggaatgcgttcagcttaccagtccgcctcctggccgaggatgcgcaatatatcctgacgatgctgcagcagctgcgggttatcgcgatgacggggaaaagccagcggcagcgcaaactcggcgataatccgccctggacgcggcgacatcaccagcacccgctcgcacagcagcagcgcctcttcgatatcgtgggtcaccagcaggctggtatacccctgctgctgccagagggcgatcagctcccgctgcatactgatgcgggtcagcgaatcgagtttgcccaacggctcgtcgagcagcagcagacgcggttcgttcaacaaggcgcgcgccagcgccgcacgctgtgccatccctccggacagctgccgcggccacgcctcgctgaaggcctgcagcccgatgcggtcaatcagcgcgtctgccttcgcctccagcccctttttgccctgcgcctgcgggcccagcagcacgttctgccgcaccgtcagccacggatagagcgtcggatcctgaaacacaaggatccgctccggccccggggcgccgggcgccgcgccgtcgatctgcatctgtccgctctgcggcgcttccagccccgccagcagccgcagcagagttgatttaccgcagccggaagggcccagcagcgccacgctttcccccgggcgcagctgcaggctaatattctccagcaccggtaccgtctgtttgccaagcgtaaacgcatgatgaagatggctgatggataccgccgcgccgcgcgctatcgtctcggttaccattgcatccctcctcgctgccagctcagcagccggtcacgcagcataaataatccgcttatcaggccggagcataacaaggccatcaccagcagcgcggcatacatattcggataggccgcccagccctgggcccactggaggtaaaagccgatccccgacttcaccccgaccatttcggcgacaatcagcaccgaaaacgacgcgccgagccccataaacaggccgacaaagacgttcggcaacgcggcggggatcgccacccgcaggatcaggaaacgctggctggcgccgagggtccgcgccacgtcgtaccacgccttatcaatgcccatcactccggaccaggtcagcaccgtgaccgggaaccaggtgctcagcgcgatcaaaaacacgctggcgccgaagctcgagggaaaaataaacaggcacagcggcagcagcgcggtggacggcaccggccccagcagacgtaacaccggatgcacccagtagccaatccgttgcgaccagccgatggccagaccggtgatgaacccgctgctggtacccagcagcacaccgagccccagcagccccagggagtgcagcaggctgtcgagcaggcgcggccagtcgtcgtgtagcacctcgatcagcgcctgcggcggcgcaaagaatggtaccggcaacacggcagttttggcggtcagcccttcccagacagcaaacagcaccggcagcagcgccagccacttgccggcatgccgcacacgcgcgccgcgcgcccgccagtagcgatagctcagccccagcagcagcaagccgccgccgagggtgaattgcgccagcgcccagccttcgctaaacggccagcgccgcccagcgtcgggccaggtaagagtaaacagaccgcccagcagccacagcgcggcggccagcagcccttctccccacagcggcgcgcggccggtggggcgcgccagagcctgctcaggcgaatacgttggcatagatactctccgcgaactgatggggatcggtacccggcttgatcacctgcacccgctgcaggtcgaccgcatactgcgtcagctctttcacgaacgcttcgcccaccgcgtgatggccgtggccctgcccgtgcaggatgccgctcacctccgcttcactggtattcagggcatgggcgaggaaggattgcgccacgctttccggatgcgcagcggcatagctgtgcgcctcaaggatcgcctgggtgagcgccgcggcggccggtttatggtcccgcgccaggctcccgctcacccccagcacgcagcagctgaggttggcataatccccggtcatattgctggcgatcagctgatacttaccggtctccagcagacgatagctgaacggctcgctgccgctgatggcggcgatttcgcgcttgtccagcgccacgctgagcagatccgccgggtagactttccactgcacgtcgctgatcgggtcgataccgtggcgcttaagcagaatggcgaagaagtttttatccggtccggccatgtcggtgacgccgatggtttgacccttcaggctctcgaggccgccgaacggcgagtctttagccgtcagcaggttcagacagccgccgtgggtcccggcggtgagcttgacgtcaaagccctgctccagcgccttcagccagcgcagcgccatccccaccccggcgtcggccttaccggtggcgatcgcctccagcagcacatcggtggagttgccgaagttaacaaactcaacgtcgaggttgtatttactgaatatcttctgctgctcggcgacggcgaccggcgcgaggcataccgcgcttttgttgatcgccagcttgatcttgtagggctctggcaggcgcagcgccggatgggcatcgccgccggccatgtccgccatatcatgagcccacagcggcagagagaccccggccagcgccaggccgccgctgagctgtaaaaaacggcggcgggaaaaagtggttctggtcatggcgtcacctcggcggcgggcacgctaaaacggcggtcaaaggtcggcttcacgtccagccgggtgcggatcaggccgttggcgagataaaagtccgccgttgcctgctgctgggccactgtttcctcggccagcggctgccactgcgactggcggttggcaaactgcgcgcgggcgatctccgccgggaagcggatgatctcccccaacgttttgccgtagctgtcgagattggcgtaggcccagcgctcggcgccggccaggcgctggagataatcctgcagcgcggcgcgtttttgcggatcgttaagcgcggaatccgttgccgcgaggaaggtattccccggcagcagccctttgccgctcaccaggatctgcccctcgttggtcttcaccatttgggtggtgtagggctcccaggtcgcccaggcgtccaccgaaccgtttagcaacgccactttggcgtccaccgggccgaggaacacccactgcacctccttcggtgaaatccccgcctgctccagcgctttcagcgccacgaaatgaccaatcgaccctttaccggtggcgatgcgtttgccttttaaatcagcgccgctttttaacgtgctgccgggggataccagcaccgcggtccccgccgggttgcttttatccacggcaatagctttgaccggcgcaccgttggccagggcgaagagcaacggcgcatcgccaatgatccccgcgtccacggcgcccgcgttgagggcttccgccagcggcgcggcggccgggaactcggcccacttaatgtcgtaagggagattttgcagggcgttggccgcctccagctgcgaacgcatgccgcctttttgatcggcgatacgcagggtaagccgctcctgcgctgtcgcgtagccgcccagcgccagcagcatcagcgcggccgccacccggcctgaaaatgatagacgcatcgtgattatccttgtgattgaaagacgaagttgccggctgccagccaggcgctgtcgctctgtggggtatgtacccgtccgcagagcacattgcggtagtggcgttccagcgggttctgtcgactcaggccatgattgccggtcagctcgagcgcaatattcaccgcctgaatggcgttgtcggtgatggtgactttcgccagattggcttcgatagcggaaaagcgcagcgcggcggcctgctccagcaggctgcggttgaccagcagcagcccggcgatctgcccgactttctcctgcacccgtggcagacgagagagcggatggccgagaccggcgggcacccgccccgccagccacctcaccagccagtcgtgagcggcgtgggcaatgctgtcatagatcgccgccagcagcgccgtctgccggttggcgaacaggcgaaacggttcggcctgggcggcgggtggcgcatcggtcggccagacatccaccgcgtgctctgccgccacccgcacgtggttaaaaataacttcatggctgccggtggcccgcatcccggcgtgatcccagcttttcaccacgctgatgcccgggctgtcgccaggcaccagccaggtgcccaccagaggcgggttatcatcgcttctggcccacaccgccagccagcgcagcccttcaatgccggtggtataaattttatggccgctgatgtcccagccctccgcgcgacgggtcgccacggtgtccggcaggccgccccgcgctggggagcccagctccggctcgacgcgcaggctgttgatgaggccaccgtgttcgacagcatcgtgaaaaacctgctggcgcagcggcgcgtgccaggcgtcattttccgccagccgcaaatggtggagatactgcatgcagacgatcagcgctgtcgccggctctccccaggcgatggcggcgatgacctgctgcagctgggccagactggcgcccgcgccgccgcaggatggcggcacggcgagacttaaccagccccccgcacgcagatggtcgatattacgccagggaaactcgccgctggcgtcaaggctggccgcctgctccgccatctgctggcgaagcgccgtcagctgccgggcccagtcgtcgcgctcaggatggatcacgatgcgcgctccgccactgcacgccgggcggctttttcccgggcgatcggcaacagcgcccggccatagtcggccgcgtcgttcagcggatcgaagccgcggatcaggaagttacgcacgccgaggtcgtagtaatcgagcagcgcatccgccacctgctccggggtgcccaccagcgcggtggagttatgtccgccgcccaccagctgggcgatgccggtccacagacgtttgtccaccactctgccctgcgccgcagtagcccgcagccgctgggcgccgatgctgtccggtttggctttgaacccgcctccgcgctgcgccgcctgctcggtggcgacgtgcaggatatgctcggctttctcccaggcttcggcttcgctgtcggcgataatcggccggaacgagacgctgaagccgatatcacgctggtgtttcgccgcttcggcgcgcacccgctggatggtctcgccggtttgcgccagcgactcgccccacagcgcgaagacgtcggcatgtttgccggcgacggcgatggccgcttccgacgagccgccgaagtagatgggaagatgcggcttttgcagcgggcgaatggcggaccaggcctgctcggcctgatagaaatcgttgtgaatatccaccggctgctcgctggtccacacctggcgcacggtgtcgaggaaggcgtcggtgcgggcgtagcgctggtcgtggtcgagataatcgccatcccggcgctgctcggcatcgttgccgccgctgatgatatgcaccgccaagcggccccccagcaggtgctcaagggtagcgaatttgcgcgcggcaagggttggggaaacaaaaccgggacgatgggccagcaggtactgaattttctgcgtcgacagtcccgccagggccgtcaccagaaagccgtcgggttgatcggaccagtggccgaccagcagacgatcaaacccggcggcttcatgggtttgcgcaaagcgaacgatatagtcgcggtcaaagatcggccccaccggggcaatcgtttcggaagagaggcggtggccaatcatgccgagaaactgaatgctcatgaacaactccttgcgtcagggtaatggagtggccgcgacagcggcgctggtcattaccctatacagagcgtgttaatgagcaaaatgcatttttatcatatcttaatatgcttaattagcattaaacaaaaatgcattttgctttcagtcggatacggtcagctgctgcatcactttgctggcaaaaaaggccagcggcggctgcaggttcgccagatactgggcgtggatcagccacagtgagaccgcaggctgaaaatcgctgaggctgaggaccgcgacctcgtcccgccacgggctgctggccagcgccgccctcggcaccagacccagccccagcccctgcgccaccagcgctatctgcagctgcgcgcccgcgctctcgacgttgagcgtcaaccgcaatccctggctctgcagctcgcgaatgagcccggcgcgcaggccacagccgtcggggttaaggatccagccccgttcggcgcactcccgcagggatgacgcgcgcaaattcaaacgccggccgacgatcggcaccacctccaggggacacagcaggcgcccgctgtagccctcggcgaagctttgctgggcgggccccatcgccagcatgccgtccagctcgccgttttccagccggcgctgcagctgtccgctccagccgcaggtgatctgcggcgacagtccgggaaactgctggctcagcgccgacagcgccgccggcagggcaatctcgctgagactctgcggcacgccgagacgcagcgcgccgcgcggctcgccttccggatccaacaggctgtagagttttttcgtctcacgcttaatgctcagacactgctcgtacacccggtgtccggcggcggtcagggtcagcgggcgggtctggcgctctaacagcgtgacgttcagctcctgttccagacgctgcaggcgccgggtgatggccgactgggtgatccccagatattccgcggcctgattgagggaggaaaactgcaccgtggccagcaaagcgtcgatatcgtcaatgcgcataggatccttatgttaaatttgcatattaatatatgcgtaaattgcatttaaataatattaacgcctctgttagcgttttgaccagtccctctgacaggaaccgcacatgactgcaccacgactggaaaaattacgccatttcattcatgaggtagaccgcctgcaccgcgaacaccaccagaccgccccgctgcttgacgccgtggcgcagcggctggcggcgctggtgcgttacgacgactggctgccggaagagtacaccctgccgcatccgcaccattatcagcagtatctgctgcatgccgactccggggagcgcttctcgattgtcagcttcgtctggggaccggggcaagcgacgccgatccatgatcaccgggtgtggggggccattgggatgctgcgcggcgcggaggaaaaccagcgttaccagctggatgccgatggcataccgcgcgcgctgggcgccgccacgcttctggaagcaggccaggtggagaaagtctccgctgacgatggcgatattcatcgcgtcagcaatgcgctggcggatcgcgtctccatcagcattcatgtctacggcggcaatatcggcgcggtgaagcgcgccgtgtataccccggaagggcagcagaaaccgtttatctccggctactctaaccgccatttacccaatatctgggattcctcccgcgaacatcaaggataaccactatgtccacctacgcttatcgccaggccgccgggatccgccaggcgctgctcgaccgtcgtgaactggcgctgatcgacgtccgtgaagaggccgatttcgccaccgctcatccgctgtttgccgtcaatctgccgctcagcaaactggagctggaggtccgccggcggataccgcgcttcaccaccccgctcaccgtctacgacaacggcgagggtctggcggagatcgccatcgaacggctgcggtcctggggctatcaggatgtggccctgctggccgagggtctcgccggctggcgccgcagcggcggcgagctgtttcaggacgtcaactccgccagtaaagcctttggcgagctggtggaaagcgtgcgtcacacaccgtcgctcagcgcccaggaggttcaggcgctcatcgacagccggcaggaggtggtgatcgtcgacgcccggcgcttcgatgagtaccagaccatgagcatccccggcagcatcagcgtgcccggcggcgagctggccctgcgggtagagagcctgacgccctccccgcagacgccggttatcgtcaactgcgccggacgcacccgcagcatcatcggcacccagtcgctgatcaacgccggcgtgccaaacccggtccatgccctgcgcaatggcactatcggctggacgctggccggccagacgctggcgcaccagcaacagcggcaatacgatccctccgcccgcgcctccggcgcccgggccgctgaggtggcgcattttgccgaacgggccggggtggcggtcatcgatgaggccacgctgcaacgctggcagcagcagagcgaccgcaccaccttcctgtttgatgtccgcagccccgaagagtacgcggcgggtcactatcccggcagcctgagcgcgccaggcggccagctggtgcaggagaccgaccacttcgccagcgtacgaggggcgcgcattgtgctgctggatgacgatggcatccgggcggcgataaccggctcgtggctggcgcagatgggctgggagacggcgcggctgagcgcgctgtcgaccagccagttgagcgaacgcggggtgcctgccgccgaggtgccgcccggcccgcaggcggaggagataagcccgacgcagctggcgcaacagctggaagaacccggtacggtggtgctcgattttaccaccagcgccaactttgtcgctcgccatatccccggcgcgtggtggctaacgcgctcgcagctgcgccaggccctggaagcaatccctcccgcccaacgttacgtggtgacctgcggcagcagtctgctggcccgctacgcggtgccggaggtggcggccttgaccggtaaaccggtgcagttgcttaccggcgggacgctggcgtggatcgccgccggtctgccgctggcgcatggcgacagcggcctcgccgtcgagcgccgtgaccgctatcgtcgtccgtacgaaggaaccgataattccgcccaggccatgcaggcctatctggagtgggagtatggcctggtggatcagctggcccgcgacggcacccacggttttcgggtgctctagcgcgagcccgcctcaggcttcgcgcatgatccacgaatactgaaagctcttcggcgccggaaaatgggtccggcgccggtaggagcccagcgactgcggggtgcagtaggtacaactccccagccattcaacgctcgccggcaccacccccgcctctgcgaagagcgcttcggcaaaggcgcgcagatcaaaccacagattatcgctgccacgcgcggcggctttgagcggatcgctgaccgggcccgaacgggaatggaacagccgctggcgatggcgggccacccggtcaccgccgggctggtccagcagttgctgatagaatccggcggagacttcgtaacagcaggggtgaatatgcggccccacggcgatgaccagatcggccaatgccaccccctgctggcgaaaacaggccagactgttgtcgacaataccgctgaccagcccctgccagccggcatgcacgctgcagacgtagcgaccgtcgcgcgaggcgatcagcagcggcagacagtcggcggtcaccacccccaccttttgcccggctaccgcggtaaacaccgcgtcggcgtgcgggcgcgtcggcagcggctgctgataatgatgaacctcattaccatgcaccagcttcaccggagccagctcggcatagggaaaggcggcggtttcatggacatcaagaaaagcgtggcggatgccagggatcgcattgagcaaacgggaggtgtaagccatagggacgataagcgtcagggaatgatgtcttaccttaggccaggggacgcggacaggcaaggcggcggcccggcatttttttaccagaccgccggatgcatatcagaccatggccgcgcgctgctggcgatgcatcagccagaacaccgccacgccggccagcacaatgcccggcgccgaggccgccatcaccccgacggcgccggtgccgagggccagcatcttgccggccagcagcgggccgctcatcgccccaagacgccccaccgccacggcggtgcccaccccggtggcgcggatggccgcgggataaaaaagcggcgccagagcgtaaagcacactttgtccgccggtggcgaacagcccggcgacaaaccccgccagcagcatgccagtcagcgacgacgcgctgcccagcgccagcagcgacgccagaatgccgctgtagatcaggagcgacatccgcagcggggtgagcttatccattagcgcccccagcagcagcgtgccgcaggcggcgccgatctgcagagagaacatcacccccgccgcctggctggcgcggaatccctggcccaccagcagcatcggcagccagttgatcagcatatagaccaccagcagggtgaaaaaataacccagccacaacagcagcgtagcggcggcctggcccggggcaaacagggtgcgcagcggcacgctggcctccgcgcgctgaaacgcctgcgactccggcagccagcgcatcagcaacgggatcagcagcagcgggaccacgccgccaatccagaaaataatctgccaggccgcggcgagaccggaaaagcccagcgctgccgccagcgcggcgccaatgggtacgccgcagtacatcaggcttaccgcccggccgcggaaacgtgagccagcggcttccgaggttaaggcaatcaggttcggcaatgccgccccgagcccgacgccggtgagcaggcgcgccagcagcagcgtcgggaagctccatgccagcgcggtggccagcgagaacaggccaaacagcagcaccgaccccaacagaatgcgcttacgcccgtggcggtccgccagcatgccgcccaccagcgcgccgggcagcaggccgaggatcccggcgctgaagatccagcccatctgcattttatccagcgcaaaggcctgcgccatgccgacggcggcgatccccgccgcctgcagatccagcccttccatcagggccaccataaaacagagcccgatggtgaccaccaggcgcgagggggttgcagtcgttatcttggtcatagggtaccttggcgatagccgaacaaacggagcaggtgactggcggctgatgctttgtcagccgcacgttcttagttatttattgcggttaagcagatccagcgcgacgtcgacgatcatatcctcctggccgccgaccatccgccgcttgcccagctcgacgagaatatccaccgcgctgaggccatagcgcttggccgccgcttcgctgtggcgcaggaagctggagtagactccggcgtagcccagcgccagcgtttcgcggtcgacacgcaccgggcgatcctgcagcggccgcaccagctcatcggccgcgttcatcagggcgtagagatcggtgccatgctgccagccgagcttgtcggcggcggcaataaacacctccagcggcgcattgcccgcccccgcccccatcccggccaggctggcgtcaatgcgatcgcacccctcttccaccgcgacgatcgagttcgccaccccgaggctcagattatgatgggcatgcatcccggtggcggtctccggcttcagcaccgccttcagggcgcggaagcggtcgcgaatgtcgttcatgttcatcgccccgccggaatccaccacatagatacaggtcgcgccataagattccatcttcagcgcctgctgcgccagcgcctgcggggagatcatatggctcatcatcagaaaaccgacggtgtccatccccagctcgcgggcaaaggcaatatgctgcgcggcgacgtccgcttcgctgcagtgggtggcgacccgcaccacccgcgccccggcctgatacgctgctttcagatcgtgcagcgtgccgatgcccggcagcagtaaggtggcgattttcgcctggctcacgacatccgctgccgcttcaatccaggcgatgtcgctgtgggcgccaaagccatagttgaagctggatccctgcaggccatcgccatgggccacttcgatggagtcgaccccggccttatccagcgcgctggcgatctgctgcacctgcgccagggaatactggtgacgaatggcgtgcataccatcgcgcagcgtcacgtccgagatataaagttttttaccgttcatgctgtcgctcccgccgcgctgtgcattgccccggccatttgctccgccgtcgccagcgccgccgaggtcataatatcgaggttgcccgcgtacgctggcagatagtgcgccgccccttccacttcgaggtacaccgcggttttcaggccggaaaaacagccgacgccgggcaggttgaccggcctgtcctcggggataacctcaaactgaacctgctgcttcagccggtagcccgggacgtaagcctgcaccgctgccgccatttcggcgatcgaggcggcaatcgcctcctgcgacgccagctcgctcaggatgtagacggtatcgcgcatcatcagcggcggctccgcagggttcagtacaataatcgctttgcccttgcccgccccaccgactttttcaatcgcctgcgaggtggtttcggtgaattcgtcaatattggcccgcgtgcccggcccggcggattggctggcgatcgaggccacaatctccgcgtaatgcaccttcgccactcgcgagaccgcggcgatcatcgggatggtcgcttgcccgccgcaggtcaccatattgacgttgccctgatggagattgtccgcgaggttgaccaccggtacgcagtacgggccaatcgccgccggcgtcaggtcgataacgcggatccccggcttcgcttcgcgcagcgcggcatcgtttttgatgtgcgccccggcgctggtggcgtcaaaaacaaaatcgatgtcggcaaattccgccatctgcatcaggccgcccaccccttcgtgagtggtcgcaacgcccaggcgccgggcgcgggccaggccatccgactgcgggtcgatgccgaccatcaccgccatctccagatgctggccgtggcgcaggattttaatcattaaatcggtgccgatattcccggagccgataatggcgactttacgtttacgcatcacgatctccttctccggcggcaacgaagcgtgccgcgactgagccaataccttcgatatgggcgacaaagctgtccccctcgttaatcgtcaccatcgggcctaacgccccggtcagcacgatatccccggcccgcagcggttcgccgagactcgccagcttgcgcgccagccagactgcggcgttcagcggatgccccaaacactcgctgccgcggccgctggagaccagctcctggttgcgggtcatgtgcatggcgcactgcttcagatccagtcccgccggacgctgcgccgggccgccaatgacgtacaggccgcaggaggcgttatcggcgacggtgtcgacaaagccgattgaccagtcgcgaatccggctgcccaccacctccagcgccggcaatacccattcgatggcgttatacagttcatcaaaagtggtatcggcatgcggcagatcctgcttcagcaccagggcgatctcggcctccaccttcggctgcagcacgcggccaaacggcaccccggcgttgtcgccgtagcacatgtcggcaaacagggtgccgaagtccggctgattgacgcccagctgctgctgcactttgggatgggtcaggcccactttgcggcccaccacccgccggccatgggccacgtggtgctggacgttcagacgctggatggcataggcggcgtcggcattgtcgacgccgagaatatcgcgcagcggggcgatcgcctggccgctctgttccgcgtcgcgcagctgccgggccagcgcgtcaagagaaaaagtcatcatttactccttaagcccgtgcgaggaaattgagcaccagctgattaaaactgtcggcatgttcccactgcgcccagtggccgcagtcgcggtaaatatgcagttccgaaccggcgatcccggcgagcaggcgcaacccggcgtccatcggcacgaagcggtcattgcgtccccagacgatcagagttggcgcgctgatttcgcccagccgcgggccaaagtcaggaaactgcttcgggttggcttccaggctcttgacgaagttgtccagatggtcgcggcgtgacagcatattgttgagacgcgcctcgaacagcgcctcggtgaggtcgcgggtgtcgaagacgaagatgctcatcatctttttgaggttttcaatggtcggctcgcggtacagggcgttcagcagcttgatgccctcggtcggcatcggcgtgaacaggctcatgccgccggtccccccgcccatcagcaccagcttagccacccgctccggccagctcaaggtgaaggccaccgcgctatggccgcccatcgagttgcccagcagatggactttatcgatccccagctgatcgaccacgcttttcagaatgcgggcgttgagatccgaacgcgagccgctgttgacgatagcatcgcttttgccccaccccggacagtcgaggagcagcacgcgatagcccgcctcgaccagcgggtcaatattgcggctgaagttggcccagccggtggcccccggcccggagccgtgcagcatgaccacggtctctttcccgtcgccgcagtcattgatatggatacgcagcgtgcggcccccctcgtcgacattgaggaatcggctggtggcggcttcagtttgcggttgatagctcatgttagtctcccggtcaatcaaatctcggtggtggcgctcagcgagccgaatccggcgatccactcggggatcggccggtaatagcggccttcactgcgccagcggccaaaagcggatagcgcggcaaaagcggccacccaggtcttaatttcgtgcgtcgatttgccggccatcgccgacagctcgtcattgccgatcgcgtccagttcgctcagccgcccctgctccagcaggctcataaagcggttgtcccagaccggattgaggggatggagcgagtgcgggtcttcggtaaaccgtcgggcggcattgatcacccgctgctggcgccgttcgcgttcgtccggcggcagctgttttccgccgccgagcaggcgatcgcgcagatgagcgtcggccttcgccagctccggcaccggcggctggtgcgagagtccgcccgagccgaggatcagcacccgcttattgagggtattgagaaagcggcccatcgcctcacccagcagccgggtgcgttgaaaacccggcagcggcgcggcgacgccgttaataaacaccggcagcaccggcacgcggtccaggccacccagcagaaactccagcggctgggcgaagccatggtccacctgcatgttgtacgacaccgccaggtcgataccgctgttgatcacggcgtgggcgcaggcttccgccagctcggcgggcaccggcaggtcgccggcggcgctggcgaagtcgccaatcgcagtggcgccgacgccgaggcagaacggcggcatcacgtcatagaaaaaaccgttgtagtgatcgggggcgaagagcaccaccagctcgggatcgaattcagcaatccaccgccgggcgtcggcaatcaccccgttcacttcatcgaggaccgcctgctccgggtccacgaatcccaccagcggagtgtgggagagacagtgcaaataggcatgcatatcaggccaccttctcttcagcgtgggcggtatccccggttgcgagggccattttttccgccagagcggtcagctgcgcgccgagggtttgcgggatggcgagagcggcgacaaagcggtccggcctgaccacggcgatggcggtgttatgcagtgcaaaccagcttttgaggcggttttgcgtatcgcccacccgcagcgtgccgggggcgttatcctgctcgcgatggatctgcacctcgggcaccacctggataaagcgcacgccaatcgcgcgccagcgggcgatctgcccggcgtcgagcccccactgcgggttgcagccccagccgataatggcgaaattcgcgccgatgacgtcgtcgagcagcacgctctcgccgctctccagcgtcacctgcggttgaataaacattttgcccaccggcgaggttttgctggcgccgtcggtcagcagcgccccctcgcggtactgcggcatcggcttaaagcgcatttcgaggaagtagcgcttcaccggcggcaggtagttcagcagccaggagaggccgtcgcgcgcggccccctgccagcgcttcggcggcgccagcacatggccggcggtaaccgacaggtcaatcatcgctttcgcgtggtcgcggcgctcctgctggtagctgtcgagcagcgtctctcccgctttgccattgaccaccagcgccagcttccacgccaggttgaaggcgtcgcgcatgccgctgttatatccctgcccctgccagaccggcatgatgtgcgccgcatcgccagccagcagcacgcggtcgatgcgaaagcgctcggcaaggcgggcgttatgcgtatagacccgctggcggatcagctcgacgcgatccgggtccggcagcactttgctcagcaggcggcgcatattgtgcggttcgctgagctgagcttcggtttcgccgggcatcaccataaattcaaagcggcgcacgccgtggggcagcgcggcggaaacgtagggtcgcaccgggtcgcagcacaggtaaacgtgcggggtggccagcgggtcgttagcgatatcgatgacgatccactgattcggcgcggttttaccttcgaaggggatgttcagcgtacggcgaataaagctggcgccgccgtcgcaggccaccagccagtccgcgcgcaccgtctcccgctcgccgtccggtcctttaagatttaacgtgacaccgtcaccggtctggctaaaggcttccacttcgcgggagaagaggcagcggacctgcgggaaacgctgcagaccgtgatacatcaccgcatcgacctgcggctgaatgaaggcgttgcgccgcgaccagccaaattcatcggtcatcggctggatatcggcaaagcagcggccttttggggtgagaaaacgcatggcgtgccacggcgtggtatgcggcagcacgtcattcaccagccccaccgcctgcatcgcccgcagggattcatcgtcaatgccgatggcccgcgggtaatcgatcagtgtggcgagcttttccaccaccagcacgctgatgcccatctggccaaagtagttggccatcatcagaccaaccggaccggcgccaacgatggcgacctgagcggtatgctgcacggcgggttgaatatcgggtgtagatgttgtcattctcagcgacctcacgactcggaaactgcccggctgacaggcaatttgttaatcatgtgtaaacgtatttttataatgggctgagtatagggcgggggttttcggctacaatcaaaacatcatcgaatgtgcaccaggtgcacaacgctgtttttaaagcattttaatggaggatttatgcgtgacgatgggtccgcagcgtacaaaacggtgcgcggattaagccggggtttattgttattaaaattgttaaataaattcgacggcggcgcgacgccgggcctgctggcggagtttagcggcctgcatcgcaccaccgtgcgccggctgctggagacgctacaggaggagggttttgtccgccgcagccgctccgatgacagcttccggttgaccattaacgtccgccagctgagcgatggatttcgtgacgaacattggatttctgccctcgccacgccgctgctcggcgagctgctgcgcgaggtgcagtggccaacggacatcaccaccctcgacgtcgacgccatggtggtgcgcgagactacccaccgcttcagccgactgtcgtttcaccgcgcgatggtcggacggcggctgccgctgctgctcaccgcctccggactgacgtggctggcctttgcccccgacgcggaacgcgacgccatcgtcagcatgctggccgcccgtccggaagctgagtatcagctggcccgcgaaccggaacggctggcggcgatcctcgcccgcacccgccagaacggctatggcgaaaacttccgcggctggcggcaggaggagaaaatcgcctcgatcgccgtgccggtctgcagtcagctgcgggttatcggctgcctgaacctggtctatatcgccagcgcaatgaccattgagcaggcggcgcagaagcatctccctgcgctgcagagggtggcgggacagatagaagcccgcatggaggatgaagaagtgtggtacgaaatgccctgatcgcgatgagggtaaccgcgatcaaccattgcgcccggcttcgttatataatttaatacacaacgaattttcacgccattcgggccacaccatgtcaaaacaccccttactgctgggcctgacgctgctcagcgccagcctgttcaccggccaggccttcgccgaccgcaccgtcaccgaccagctgggtcgccaggtcaccctccccgaccacgtcacccgcgttgtggttctgcagcatcagacgctcaacctgctggtacaactgcatgccgccgaggatatcgtcggcgtcttaagcagctggcagaaacagctcgggccgcagttcgcccgctttatgccgaagatcgcgcagctggcgacgccgggcgatcttacccaggtcaatattgaaagcctgctggcgctgcgtccgcaggtggttttcgtcgccaactatgcgccgccggcgatgatcgcgcagatccaacaggccgggatcccggtggtggccatctcgctgcgtcacgatgccgccggggaaaaaaataaaatgaaccccaccatggctgacgaagagcaagcctataacgccgggctgatggaggggatccgccttatcggcgaggtggtcgagcgccagcccgaggccgaggcgctgattcactacaccttcgaggcgcgcaagcaagccaatgcgccggtggccgatattccccagaaccagcgggtgcgggtgtacatggccaaccccgatctgaatacctatggcgctggcaaatacaccgggctgatgatggcgcacgccggggcgctgaacgtggcggccgccagcgtaaaaggcgcccgccaggtgtcgctggagcaggtgctggagtggaacccccaggtgatcttcgtccaggaccgttatccgcaggtggtcaaacagatagagaacgacccgcagtggcagacgatcgatgcggtgaaacatcaccgcgtgtggctgatgccggagtatgccaaagcctggggctatcccatgccagaggccctggcgctgggtgagctgtggatggcgaaaaaactctatcctgcgcgctaccagagcatcgatgtggacagtaaagccagggattattatcagcgtttttaccgcgtggcgtggacgccagatgcccgctaactctcagccctggctggtgcagggaagcctggcgctggcgacgctggcgatcgcggtcgcctcgctctgtttcggccagtacccgttaagcctgagcgccgttggccacaccctggtccatctgccgccaggagaaggggtgatcgggcagatcgtctggtcggttcgcctgccgcgcgtggtgatggccctgctggccgggggcgcgctggggctgtgcggcgccaccttgcagggcgtgttccagaacccgctggtggacccgcacatcatcggggtgaccgccggctccgcctttggcggcacgctggcgatcctgttgggcgtcggcagtctgctgatgatggcctcgacctttttcttcggcctcgtcgcgctggggctgatttacgccctcgccgccctgcaggggcgggacagcacgcttgggctgattctgtccgggatcattctcagcggcttcttcgccgcgctggtcagcctgatgcagtacctcgccgacagcgaagagacgttaccgaacatcgttttctggctgctcggcagcttcgcgaccgccagctggcataaggtactgcttatgtccctgcccctggcggtggctgccggggcgctgtggaagctgcgctggcgtatcaacctgctggcgctggaggaacgggatgcccgcagtcttggcgttccggtggccgcgctgcgtcgcggcgtgctggtttgctgcgcggtgctggtggcagcccaggtggcggtcagcggcagcatcgcctggatgggtctggtggtcccgcacctcgcccgtctgctggtaggggctgaccatcgtcgcctgctgcccaccgccttctggctcggcgccgcgctgatgctggtggtggacgatctggcgcgcacgctgacccaggcggagatcccgatcgggatcgtcaccgccctgctcggggcgccgctgtttaccgtgttgctggtgcaatcccgacgccggagtacgacctgatgaacagctcattatcgctgcaagcgctacgctacggccaccgtcagccgctcttcgccccgctcacgctggcctgccggcccggtgagatctgggcggtgctgggcgccaatggccggggaaaaagtaccctgctggataccctgaccggcgtgttgccgccgctgggcggcgagatgcagtgcgagggcggcgtggccctggttccgcagtcgtttcgtcccgcttttcgctggcgcgtgagcgatgtggtgctgatgggccgggcccggcacgtggatctctttgcccagccggacgaggaggatgcccggcgggttgagcaggcgctggcgcagctggggattgccgccctggccgaagatgacttcggcgccctctccggcggccagcagcagctggtgctgattgcccgcgcgctggtcagcgccagccagaatatcctgctggatgagccctgctcggcgctggacctcggtaaccagcaggtggtgctgcagctgatcggcgacctcgcccaccgccaggcgcgcaccgtcctgttcaccacccatgatcccaaccacgccctacaggtggccagccatacgctgcttctgctgccggagggccggtggctggcgggtgagaccgccgacgtgctgagcgaaacgcatctccggcaagcgtacggcctgccggtacgcctgatccgccatgccgcctccgcgttccctctgctggcgccggggtttacgctgcgtcgctgaacggcataaaacccgcctgccggagatacccctgaccaacgtcgccgaggataaagcgatacagggccagcgcggcgggatcggccctgagacgcgccagctggtaatcgcagcgaatattccacggcgccgcgatggtcagggtacgcagatcgtcgcaggcggccagcgcggggccatagtgcgcatagccgataaacagatccgccagattctggcgaataagccacgcgccggctatctctcccggcggcacgctcagtgagtctctgccgccgaccagctgctgcgcccgcccggccatcgcgttgcccaaccctggatagcgtgcctcaattcgggcgaacagctgccaggtataatctcccgacggatcgcagcccggcgtggaggtcgccaaccgcaggcggggcgtgctgagcagcgccagccagtccaggccatcgttgtccggcgaccgccgggcggtcagcatcagctggttgctggcaaatccctggcattcctgcgccagacccgcctgcagcagcgcctgcgggtgcgccgcgttggcggaagcaaaaaccgcgcacggcgacccggcttcgatccgctcgcgcagcaggccggcagggccaaactgcgcatcgaccgccaggccagtgtgctgccgaaagtgcgccaccagcggcaggaaggcgcttctcaggcttcccgccgccagcagcgtgagagtggtatttgccataggatatcgctataaaccggataatatagcgctatattacccggtttgccgtcgcgtcagtagcgaatttctgccagcgcccgcagctgctcgggggtggctaccggtaggtcaaaaaagcgcagataggcagggatcatttcaaacagcatgtcggtcccgcgctggatgtggcactgtcgtgcctgagcggccctcagcagcggggtgtactcctgagtcatgacgacttcccccacccaggcgccaggcgccagacggtcaacgtccagcggcagcggatcgctggccttcatccccagcggggtggcattgaccaccagctcgtgtccggcaggatcgggctgcatcagggtgatatcgagctgcggatagtgctgatgcagccgcccggcgagggcgtgcgccaccttgggccgggtatcgtacagggtcagggcgctgacccccgccgccgcgagggaggcggcgatagccgatcccaccccgccgctgccaaccaccagcgcccgcgtcccctgcgggttaaaccctttacgacgcaggcccagcacaaatccctcgccatcgaacatgtctccgctcaggctaccgtcagcctcgcggcggatggcattgcaggcgccagcgatggccgccgtcgggctcaggcgctgcaccagatcgcaggtggcgattttatgcggcatcgtcaccagcgcgccgatgatgttggtcatcgtaaacagcggcggaataaacgcggcgtagtcctccggcctgacccccatcggcaccaccttcacgtccacctgctggtcaacgaaccacgggttgtagatcatcggcgccttaaaactggcggtcggatagccaaggtgcgctatcagccgcgtatgcccactaatcaccatgccttgctcctttgcttactgcgataactcgatacgtttgacgtcgccgaggataaacagataggccaccacgcccaacagcgcggcgccgccgatgtagatcaaggcgtagaagaaattgccgaacccggcaacgataaagccgatcaccagcggggtgaggatccccgcgaggttggcgcagaagttaaacaggccgccggtcagaccgcccagccccttcggggcgatatcggagatcagcgtccagccgagacccaccatcccctggccaaaaaaggcaaacgacatcaccaggatcaccgccaggtcgctctccagccagttggcggtgatgatgcagctggccatcagcaggccggcaacgatcggcagcttacgaccgaggttggctgacccggtggctttcagcagcttgtcggagagccagccgccaaacatcaccccgccggcggcggcgacaaacggcaggatggagaaaaagccgaccttcagccagggcatatgccgctcggtggccagccaggtggggaaccaggtgagaaagaacaccagcacggtattgccggcaaactggccgatactggcgccgatgatctgccgtttgctcagcagctggcggaccagcggccagctgaacgccacctgctggtcggtcggggcgctgaggccgccgccgttttcgatatgctcgcgctcctgctggctaaggcgcggatcttcatgcggttcgcggtagcagcgccaccacaccagggcaaacagaatgccgacggcgccaacgctgacgaacagcacccgccagccgaaaccgtccatgatccagaacagcagcggcgcaaagcaggccagcccgagatactcccccacggtgtacaccgccgtggccttcgcccgctcctgctgtgggaaccaggcgctgaccacccggctgttgaccggaaagcacggcgcttcgctaatgccgagcccgaagcggcacagcagcagcgtcttcagccccaccgccatgccgtggaacagggtaaacagcgaccacagggtcagtgacaaaaagtaggtcactttgttgccaaagcggtcgagaaacaatccgccgggtatctgcgccagagcataggtccaggcgaaggcggagaagaggattcccatgatcgccgggtcgatccccagctcagcggtgagctttggggcggcgatccccagtacggtgcgatcgagatagttgatcatggtgccaatggccaacagcgcaagaatgccgatacgccgccgggagcggcgcacggtgacggctggctgggcggcagccgtcgggttagggctatatgagctcatagtcggttcctgtctcgggtacagaggatgttgttattgtgtttaacgcataatgaaccatttgattcaggctaacaatactgcatcgccgccagacggacggccgcattcgctgcgccatagagcgcatagccagcccggcgctcggttaactcaaagaaaaagcggccggcggtaaacggccgggtgtaaagatgcaggaaatctcccccctgcggatcgcggtcatagaggagctgctggcgctgaagctgcccgacgtccagctcgccgccaaagcgcgccagcagatcgtcataataattggccgggatcggcagcgtatggcgggcaacctcggcaagctggtcgcaggcggccggcagatcgcggcaggcaaaggcggcatgctgcagccccgccccctggtagcaggcgacggagcgggcgatctgcgtcgcccggctctgcgaaatattcagcgccagacggatatcgccctgcgggctgcgcaccgccaggctgcgcaccagtccatacgggtccggcagcgtctgctcatgctcaagggaaaaaccaaacaccgtacggaagaacatcacccagttatcgcggctgtcggcctccattcccagcgccagatgatcgataccgagatagtcctcgcgcaccgtcacgccatcacgcagatgaaaatcgcgctcgtagatagcctccccggcgtcgatgagatagataaggctgccgtcgggggcgcagatcgccgggatcggcgtttcgttcggcccggcgtcgccctgccaggtggcataccccagcgcgcgggcgcgggcgacaagcgacgcgctgtgctcgacccgcagcgccatcgcgcagagcgataccccgtggcgttgataaaaatggtcggcccagctgtgcggctgatggttgatgacgatccgcgccccgccgttgcgccacagcgtcacctgtctggagcggtggcttccctcgtgctgaaaacccagcgcctgcagatgttgccccaggcgctgcgcctcggcggcgctggcggcaaactcgataaactccagcccgtgatagaccggcagcggcggcggtgaaaacagatcggcatcgcacgtcgggagccgacggcgggtttgctcctccagccacagcagcgaacgataaccatctttggccgtcgcgccgttcggcgaggcgcgaaaaccgtcattgaagatctccagcgaccaggggccgcggtagccacagcgggtgatctgctcggcaaacgcctccagcggcagctccccctgtccgggaaagcagcggaagtggcggctccactccagcaaatccattttcatatacggcgcatcggcgagctgtacaaaggtgattttctccaccggcaccgacggtagcgcgtccagcgtgtcgccgcgggccagaatatggaagctgtcgagcaccaggcccaacgccgggctgtccacccgccgcacccgctcccaggcctgctgccagcggttcacatgggttccccaggccagggcctcatagccgatagcgatcccctcctcttccgccagcgtggccagcgcccgcaggtccgcgacctgcaattcgctatccgccgagcagtccggctgtacattgctgcacaacagcagcgtttcgcagcccagctcgcgcatcagagcaaacttgcgccgagcgcgggccatattcgccgcaaactgcgcccgactggcgccttcaaaatcgcgaaagggttgaaaaagcgtgatttttaaccctaaatcggcggcaagctggcggatttccgccggcgtccccgtataatagagcagatcgttctcgaaaatttccaccccctgataccccgccgccgcaatagcgtgcagcttctcaggcagggtgccggaaatcgaaacggtggcgatagagcgcagcataaggtcctcgggtcaacagctgacgtaagccttgaatatgtatcatttggttcatttgcgccataccaggttgctaaattgtgatcattatgtgtattttttgtcacccaagaaaaaggagttgccatgaccgtcgttgcccatgatgaagcacaatccctgaaggcgcggatcttcagcgccgctatcgctgtctttgctgaacacgggctgtcaggcgcccgcatggagcagatcgccaccgaggcgcagaccaccaaacgcatggtggtttactacttcaaaagcaaagaacagctctatcaggaggtgctgcagcatgtgtatgcgcggatccgcgaaaccgagcagcagctggggctggagaatgtgccgccggtggaggcgctggtgcggctggtgcgctggagcgtgcgctatcacgccacccatgcggactatatgcgcgtcatttgcatggagaatatgcagcgcggcaagtggttaaaaagctcgggtgaactgaagccgctgaatcgtaccgccctgtcgattctggaagacattttactgcgcggccagcagcagggcgtctttcaggcggggctcgacgcgcgcgatgtccaccggttaatcagcagcttcagcttttatcaggtgtcgaacttctacaccttcagcagcctgtatcttgacgatccgctacccgccatcgacgatgaagcgatggtggctcaccattgtgacattgccgtcagggcggtgatccgcttcgtgatttcctgacccgccggcgcaagagatcagtgcccggaaagcgcatgaatgactttctccatagcctccacggtgagcggcgaacgctggattttgcggttcgccagcgaggtgcgcagcacaccggcaatgacaatgtgtttcggctcctgacccaggtcacgcatttccagcacgactttacccaccacgcggcacatttcctggtacaggtcgtcgtctttcgctttatttcccatagaatttagctcgtattttatcattatcaatcaaatcattattgatagatttcccgcacaacgcaaaccatcgccactttaaaggttcaatgacgcattttaccggctcatgatggcgaaataatccatttcttttactctttttcatagccggtgacgaaaaagtgtgttgcgtagatttttgcataacgtgccggttttgttacgcgttttgtccataatttgaaacgaggtttttattttcctttttgatttcggcagcgtataatgcgcttcgattctttcttgaatggtttcagcgcattggactgcatgataaaacgcataacaccttgccacatttcatgggctgaaccgccagcacacattcttctgcacgcttcagggttgtcacctatccttagggcgtggcttagcaactttcgtaatacaggtttggctccccggcagtgcgcccgcggagcgagaattccatatccttcacaacttaaagactaaaactgtcatgaaaaagaccaaaattgtttgcaccatcggtccgaaaaccgaatctgaagagatgctgaccaaaatgctggaagccggcatgaatgtgatgcgtctgaacttctcccacggtgactatgcggaacacggtcagcgcatccagaacctgcgcaatgtgatgagcaaaaccggtaagaaagccgctattctgctggacaccaaagggccggaaatccgtaccatcaagctggaaggcggcaacgacgtctccctgaaagcaggccagaccttcaccttcactaccgataaatccgtcatcggcaacaacgaaatcgttgcggtaacctatgaaggcttcacctccgacctcgccgtcggcaacaccgtcctggtggacgatggcctgatcggcatggaagttacggctatcgaaggcaacaaagttatctgtaaagtgctgaacaatggcgacctcggcgagaacaaaggcgttaacctgccgggcgtctccatcgccctgccggcgctggctgagaaagacaaacaggatctgatcttcggttgcgaacagggcgtggacttcgtcgcggcctccttcatccgtaaacgttccgacgtcgtcgagatccgtgagcacctgaaagcccacggcggcgaaaacatccagatcatctccaaaatcgaaaaccaggaaggcctgaacaacttcgacgaaatcctcgaagcgtctgacggcatcatggttgcgcgtggcgacatgggcgtggagatcccggttgaagaagttatcttcgcccagaaaatgatcatcgaaaaatgtatccgcgcgcgtaaagtggttatcaccgccacccagatgctggactccatgatcaagaatccgcgtccgacccgcgctgaagccggcgacgtggctaacgccatcctcgacggcaccgatgcggtgatgctgtccggcgaatccgcgaaaggtaaatacccgctggaagcggtcaccatcatggcgaccatttgcgaacgtaccgaccgcgtgatgaccagccgtctggacttcaacaacgacaaccgtaaactgcgcatcaccgaagcggtgtgccgcggcgcggtagaaaccgctgagaaactggaagcgccgctgatcgtggtcgccacccagggcggtaaatccgcacgcgctgtgcgcaaatacttcccggatgccaccatcctggcgctgaccaccaacgaaaccaccgctcgtcagctggtgctgagcaaaggcgtggtaccgcagctggtggaagagattgcctctaccgatgatttctatcatctgggcaaagacctggcgctgaagagcggcctcgcgcgtaaaggcgacgtagtggtgatggtttccggcgcattagtgccgagcggcacgactaataccgcttccgtacacgtgctgtaataatttacaggttaattggttttttttaataaagcgcctcgcggggcgcttttttttattcattgattagctcttcctattaaaaatgcaaatcggaatttactatttaataagggattatctaagatgaatccgatggaagcgcgctgttttcactcgcctttttcagcgattctgagcaattcgatgcttctttgagcgaacgatcaaaaataagtgcgttcaggtaaaaaaaatattctcatcccaaaaaactttgtgtaatacttgtaacgctacatggagattaactcaatctagagggtattaataatgaatcgtactaaactggtactgggcgcggtaatcctgggttctactctgctggctggttgctccagcaatgctaaaatcgatcagctgtcttctgacgttcagactctgaacgctaaagttgaccagctgagcaacgacgtgaacgcaatgcgttccgacgttcaggctgctaaagacgacgcagctcgcgctaaccagcgtctggacaaccaggctcactcttaccgtaagtaagagttctggtaataaaaatggcgcactctgtgcgccattttttttgccctcagcatgagggctattgggtaagcagaccgttgtcagacgaactattctgcgccgacagcgacgtcgccgtgctacctgccccagccgacaccaccaccggataccccgcccttctcgacatcgcttttttcaactgcaggtcatccactgctttatcctctgcgaaggcgtgaaacgccgctggcagcgtgtaagcgatggtccgggtgttttccccttcggtctgcgaaagcggcctgtggacttcgacatagcgtttaccatccggctcgacggcaaacttcaccggctgattgataatccgtaccggcgtcccggttttcacctggctgaacagcgctttgatgtcatcagcgttcatccgcatacagcccgagctgacgcgcagaccaacgctgtctggggcgttagttccgtggatgagatattcaccgttaccgtaggccagacgcagcgcatagcggcccaggggattgttcggtccggccgggaccaccgctggcagcgtcacccctttctccagcgagcgcgcgcggatgccggcggtaggcgtccaggtagggttagggatcttctgccccacgcgggtggtcatctccggcgtttccagacctaactggccaatgcccagcggatagacctgcacctgattctctcccggcgggaagtaatacagccgcagttcggcgaggttgacgacaatgccctccctcggcacgtcgggcagcagcatctgagaagggataaggacctgagtgccgggcttcggctgcaccggcgcaatcgtatcgttggcttcgaggatcagcatcgccgcggtatcgaaatggcgcgcaatcgcctgcaggttgcgatctccctcctggaccgtccagtactgattctgaccaatcagccgactgttggcgggaggaagcgggtaatcaacggcccaggcggccgtggaggcgccaagggcgctgagaagggctaaggtgatcatcgttttgcgtttcatactgagattccttctttcgctgataaaacgccaggagactgaacggcggcagggtcagcgccctgccggacgtaacagaatgaaatctacctgtttattctagctaatatttgccgctttcgcgcgtatcgcgcggatcatggcttcgaggccttgcgagcgggagggggtgagatgctgggtgagcgccattttttcaaaccacggacgcacgtcgaactcggtgatgtcctgagcggtcatccggtcatagaggataaacaccaccgctatcagacccttgacgatcgccgcatcgctatcgccgcgcagggtgatcacgcctgtgggatcctggtccatcacgatccagacctggctttgacagccctgaataatgttctgcacgctatgttcttccgggcttagcggcgccatacgctggccaagctcgatgatatagagatacttctcttcccagttggcgcaacggctaaagttacgcaacagtttgtctttgtccggtagtgccgccattgtcccgtcctttaccctaacagtttgcggatccgctggaggccggccaccaggcggtccacctcttccgtggtattgtacatcgccagcgatgcccgacacatagccggtacctgataccgggccatcaacggcatcgcacagtggtgtccggtgcgcacggcgatcccgtagttatcgaggaagctgccgacgtcataggcgtgatgctgaccgaggttgaaagcaattacccctttacgctgcgccgggccgtaaaggatcagatccggtaccgcgcgcagggcatcgagcgcgtagcgcatcagcgtctgctcatactcggcaatctgcgttagtcccagctggctgacgtaggtcagcgccgcgccgaggccaatgatccccccggtattcggcgtgccggcctcaaagcgccacggcgcctgattccaggtggtgccctccgtcaggctgacggtggcgatcatcgacccgcccccttcccaaggcgccatcgtctgcagcagctcggaccgggcgtagagcacgccgatcccggtcggcccatacagcttgtgggcggagaaaacataaaaatcgcagcccagcgcctggacgtccaccgggtggtgcatcaccgcctgggcgccatccaccagcactttcgcgccatgctgatgcgcaagagcaatcagcgccgccagcgggttttccgtccccagcacgttggagacctcggttatcgccagcaggcgggtgcgcgggtcaaacagtcccgggacaacatccagttgcagcgtaccgtccgggttcagggggatcacccgcagctcagccccgacgcgggcgcagagcatctgccacggcacaatattggcgtggtgctccatttcgctgatgatgatgttatccccggcgccgacgttggcgtttccccagctgttggccaccaggttgataccctcggtggtgccgcggacgaacaccacttcctccgccgatccggcgttaaggaaggtggccgcctgctgacgcacggcttccatccgcgcggtggcttccgcgctgagggtatggatgccgcggtgcaccgccgcgtagccgtggcgatagaattccgcttctgcgccgatcactgcctccggcttctgggcgctggcggcgctgtcgagatagaccagcggctgaccgttgacctcccggttcagtaccggaaaatcggcgcgaacctgttctactgaaaatgtcatactgtgcctcccggcaaacgctgtccaatacgcgccagcacctgctctctgagcgcgtcgctgcggatagcctcggtgagctcggcggcgaaggcgtagaggatcatctgctgcgccgcctgctgttcgataccgcgcgagcgcagatagaacagctgctcttcgtcaatgcgccccaccgtcgccccgtggctgcatttcacgtcatcggcgtaaatttccagctgcggtttggtgtcgacctccgccagccgcccgagcagcagattattgttggtcatctgaccgtcggttttcagcgcgagcggcgcgacgttgatcagcccgttaaacaccgcccgccccttatcgctgacgatggttttgtgcagctggcggctggtgcagtagccgacctgatggtcgagccaggtgcggctatcgcagacctcatttttcaccggcatcgccagcgaattgaggcgcaggttgctgttttcgccgcccaggcgggtgctggtctggtgacgcagcacctggccgccaagcaggaaactgctgctgaaggccgaggcgtcgcggcccagcagcaggtcgttatgggcgaagtgatagctgcgggcattctcaaatgccagcttgatatgctggaggtgcgcgttatcggccaccgtcatggtcaatcgcccgccggtgaaatgcggctgctcattgaggctcaggtaatgctcgacaatcgtcgcctccgccccgctctccagcgccaggtgatggcgatagtgggcggtattcagcgcatcgccggccaggccactggtgatatgcatcagcagcagcggtttatccaggcggcggttgcgcggcacgcgaatgcgggtcaccgtctgggccaggctttcggtcagatggagaaacacctccggctgcagggcatccggcagatgctggcgctgattatcgacactgacctccacgccgctggcggcaagatcgtcgctcagctgaggatgatagcggccatcgataaacaccagccgccaggcgtccagcggcagcgccagcgcatcacgctgttcagcactgagagaggccccctcatcggcgacaaagcgaccgttaagtagggcatccagcggagtgtatttccagtcctcgtgcttgcgcgtcggcagcccaaggcgcagcagctgctgcagatgctgactggcctccggggtacgcgggccgccctgcgcttcaaacagatggtgccactgctgcagcgcgttactgctgttcggtaagccagccatagccctgctcctccagctgtttgaccagagagaaatcgcccgacttcacaatccgcccctgatacagcacatggacatagtccggcttgatatagtcaaggatgcgctgatagtgggtgacaatgataaaggcgcgtttgccgtcgcgcagggcattcactccctgcgagacgattttcagggcatcgatatccaaccccgaatccgattcatcgagaatgcacagctccggctcaagcaccgccatttgcagaatatcgttgcgctttttctcaccgccggagaagccaacgttcaccgagcgggtcaggagatcttccggcatctgcagcagcttgatcttttcttccattaagtcctggaaatcgaaacgatccagcgcctcctggccacgatagttgcgcacggcattcagcgcagtctgcaggaaaaactggttgctgacgccggggatctctaccggatactggaaggccataaagataccttccccggcgcgatcttccgcagcgagttcgagcaggtttttgcccttaaattcgacgcgaccgccagtcacctcataatcttcacgcccggccagggtggccgaaagcgtacttttgcctgagccgttcggccccataatggcgtggacctctcccgggcgcacctctaggttcagcccgcgcaggatcgctttatcttcgacggcgacgtgtaaatcttgaatacttaacatcttttttccttaattatcagccgacgctatgttcaaggctaatggccagcaatttttgcgcctctacagcgaactccagcggcagctcggagaagacgtctttacagaaaccgttgacgatcatcgagatggcatcgtcttcgctgatcccgcgctgcaggcagtagaacaattgatcttcgccaatccgcgaggtggtcgcctcgtgctccagctgggcgctgttgttgcggcattcaacatacgggaaggtatgcgccccgcagtccgggccgatcagcatcgaatcgcactgggtatagttgcgggcgttggtggcggtcggcatgattttgaccagcccgcgatagctgttctgactgtgtccggcggagatccctttcgagatgatggtcgagcgggtgttcttgccgatatggatcattttggtgccggtgtccgcctgctgatggccgctggtcagcgccaccgaaaagaattcgccgatcgagttatcgccgcgcaggatgcagctggggtatttccaggtgatggccgagccggtttccgactgggtccatgacattttgctgttctccccttcacacagggcgcgcttggtgacgaagttgaggatcccgccggtgttgttatcgccggggaaccagttctgcaccgtggagtatttcacttccgcgtctttatggatgatgacttcaacgaccgcggcatgcagctgatagctgtcgcgcaccggcgccgagcagccttcaatatagctgacgtagctgccttcatcggccaccagaatggtgcgttcaaactgcccggtcttttcggcgttgatgcggaaataggtcgacagctccatcgggcagcggacgcccttcggcacatagataaaggtgccgtccgaagccaccgcggcgttcagcgcggcaaagaagttgtcattccccggcactacggtgcccagatactttttcaccagttccggatggtcgtggatcgcctcgccgaaagaacagaagatgatcccctgctcggccagcttttctcggtaggtggtcgccaccgacaccgagtcaaatatcgcgtccaccgccacctcgcgcccttcgcgtaccggcacgcccagctggttaaaggcttcttccacctcgctggtcagaaaggtattggccccggtctgctgcaccgcgccaggctcggaggcgcaggtctcatcgcagttgccgcaggagggcgcggaatagtagctgtaatcctgataattcagcttatcgtaatgcgctttcagccagtgcggctcctccatttccagccacgcccggtaggcattcagacgaaactccaacatccactgcggctcattgcggcgagccgagatagcccgaacgacttcttcattaatgcctttggccagctcatcggtttgcaggcgagtaaaaaagccctctttgtagttgagcgggccgccggtccaggttttgacatcgtcagttgcttcagtattacgcgacatagttactccgcctgcaccccaaaactttcgccgcagccgcactcatgctgcgctttcgggttatgaaatttaaagatttcatttaaaccttcccggacataatccagctcggtgccgtcgatgaacggcatcgcctgcagcggcgcaaacagcttcgccccgtcagattcaaagagcagatcgtcgggcgccggctcggcaatcatttcgagcacatagccaaaaccagcgcagccgctggttttaatgcccagccgcagccctttcttatccggctgcttgcgcatcagatcgcgaatatgcgcggcagcggccggcgtcatggtcagtccctgccagctgaaatcggcgggattaaaagttcctgcttgtacttccatcgatagacctccaggttggcgccatcaaggcataccgccatgttagtgataatgattatcacttcaacccttctgcagcaggggtattgcctcatttagtgctttttataagcatagaccctcgcccggggattatcagggcgtgcaaatagaacttaatcgattgatttataatatgttattttgaaatcattctatctccgcacgcaatggcaaagatgtatcgaaaataccgatttatgcaatagcggcagaccaccttgctggttatcctttgcagacgagcataaagtgacaacgtaacagaaagaccatgccagcgcggggcgcggccccggccatgcgctagcaaaaagcgggtagtgaaagcgcccgccggtaacgcttcaggaaaggaataagcgccgctcgcctggccgcgttcgggaaataaaaaccaaaataaaacgggcaaacggggctgccaggcgggataccggctggctaggtgcctttactcaccagccgggcggcctggacaaagacctcatcctctaccccgtcccccttctgtctgcccagcctcaccagttcatccacgatactcccctgattaatctgcttttgggtcgccactaagctaatgaccgccgcgccgatggccatgccaatcaatgccgtttgttcatctttatctttcatggtgtcgctccgtctgtcctcctcagaaaggctagcaaaagataccatctgctcaatttcaaattcaccttctttacgtctgacgcaaagcctgcggcagggcacctggcaggagaaaaagaaactaagcggctgattgcaatggcataacactaatgaacaattaacagacttgtgagtcttgaaattattttttagactcattggtctgttaattatcaattgcgtaaaatcttatgcctaattcgaccttatttttcatcaccctttgtctctctcgcgtcctggtgaccttcttcttctggatggcaggcatctacggcgtctttcatttcgcggagatcgttcaggagatggtaaccgtcggcctgccgtggccggtcttgttcgcggcgggcacgattttttgccagctggcgggttcggcgctgatcgtttttaatcctgccggctacggctggattggatcggggatgctgattgtgtttacattactcactattccgctgggacacgccttctgggccttcagtgaaccccggcgcactgaggaattccatattgcgcttgaacacattaccgtggtcggaggattaattatgagcgcgctgtttgcaggctatcggcgatgagcgaaacccctcgtcagaaaggtcggccaaaagatccattgaaaacgcaggcgatacttcaggccgcccgtaagctgtttctggaacagggcctggaggtgacaacggccgaaatcgcccgcgtagccggggtggcgaaagccaccctgtatgccaatttcagcgataaagaacatctgatagaggcggtcttacgccaggaatcggatctcaccatcagcgaccatgatttcgcccagcgccatcatctgccgctgatcgaggtactgacggcgtttggctatcgctttgtccgctttatcaaccagcgggaactgaccggctgggaccgactgatcgcctcggctgccgtgcgtcaccccgatctccccggccgcttttacgccgccgggccggggcgcgcgcagcagatgctggaagcgatcatcgccgaggcgatcgaagccggtactttacgagcctgcgatccgcaggaggctgccgacgaactggccggtttatggctgggaatgaccagcctggcgataaaacttggcgcaagacctccgctgtccgacgacgaaatcaaacagcgggttgagcgcgccctggacgtctttctgcgcgcgtattccctggcgccgggctgatctctccttgaccttttcagcgctgtcgtctggcgtaaggctgatttattgtgcccaatccgcgcccggcgcaaaaaataatgtccttgccggttagcattaaaagaaaataacaaccacagagtgcaacgcagattattccatgagggaatagtgggaatgctaatatttcatttcctcgccggtttttagaggcctatagtttttttacctgcagaacatccactaaggttaaaaaacataaggacataataatgattgtttcagcccccagcgattatcgcgaagccgctcgtcgtcgtctgccccgcttccttttcgattatattgacggtggcgcggtggcggaaaacaccatgaacgccaacgccgccgagcttgcctcggtagctcttcgccagcgcgtactgtgcggggccggcgaaccgacgctggcgaccacgatccttgatgccccatgggcgatgcccgtggcgctggggcccgtcggcgccaccgggatgtacgcccgccgcggcgaagtccaggcggcccgcgccgcctcccgcgccgggatcccgtacaccttatccaccgtgtcggtctgctcgattgaagaggtggcgagccacgccagcggcgcgctctggtcccagctgtacgtactgaaagatcgcggctatatgcgtaacgcgctggagcgcgcctgggccgctggcatgaaaaccctggtatttaccgtcgatatgccaatccccggctcgcggtatcgcgataaccgctcagggatgtccgggccgcacgccaccctgcgacaatatctccaggcttgcacccatccgcgctgggcgatgaacgtcgggctggcgggcagacccctgtcgtttggtaatatcgaagcctacaccggccacaaaatgaccatggacgactatatggggttcatcagcaacaacttcgacccgtccatcgcctggcacgatctggagtggatccgcgacagctggcaagggaaattaatcatcaaagggatcctcgatgccgacgatgcgcgcaatgccgtgcggctgggcgccgatggtattgtggtgtcaaatcatggcggcagacagctcgatggcgccatccccaccgcccgggcgctgcccagggtggtggatgcggtcggcgacgatctgacagtgcttgccgattccggggtgcgctccggcgtggacgttatacgtctgctggccctcggcgcgaaaggcgtgctgctcggtcgggcctatatttatgccctggccgcggcgggcgaagcgggcgtggcgcatctgctgcgcttatttgccgaggatatgaaggttaccatgaccctcaccggcgcgacctcgccatcggccatcagcctcgattgccttgatcgcctcgaacaggatcaacaccacactcatgcggtgccggtatccttacccgcctgaccctgcccgggacctggcctggccatgtgcctcgcccaggtccggcaaagtggaattacctctgaaggtgcaactctgtctgttgtaccgtgttcgccgggcggatgcggaaccagatcgcgtacatggccggcaggaagataagggtcatgatggttccccccagcgtcccgccaatcagcgtataggcgagcgttccccagaagaccgaatgagtgagcggaatgaacgccaggatcgccgccagcgccgtcagcagaaccgggcgggcgcgctgcaccgtcgcctccaccaccgcgtggaacggatcgagccccgcctgttggttatgatggatttggccaatcaggatcagcgtattgcgcatcaggatccccgacagggcgatcaggcccaccagggcattgatgccaaacggctgattgaacagcagcagcgtcgggaccacgccaatcagccccagcggcgcggtcaggaaaaccatgaccatcgccgacagcgaacgcacctgcaggataatgatcagcagcgtgagggcgatcattatcggaaataacggcaccatcgcccgggtggccttgccggattcctcaatcgaccccgccgtctcgatgcgatagccaggcggcagcgagtcgataatgggctgcagcggcttcatcagcgcggtggagacatccggcggctgcaggttctccgcaacatctccgcggacggtgatggtcggcgtgcggtcgcgacggcgaagcagcgggtcctccatcctgatcgacacgtcgccaatctgtgacaagggaacccgctgcccgccgctgcccaccagggtgaagtcggcgattttcgccggatccagacggatgtcgcccgccgcgcggccgatcacctgcacggcgcgaatatcttcccggacggtggtgatcgggatccctgacagcaggaactgcagctgctgggcgacggactgggagctgagtccgctcgcctgcagccggtcctgattgaggctgaaatgcatcaccggtacccgcgaaccccagtcggtattgacggtgcgcatcagcggactggcctgcagcaccgatttaacccgctcggcgatgtcgagcagagcgtgcggatccggccccatcacccgccaggcgaccggataaggcgaataagggccaaacaccagctgagtgacgcgcacccgcgcctccggcgccaggccattggccaccgcctcccgcagccgccgcttgagcgcctcgcgggcaccctgcccgtcggtcaacaccaccagtttggcgaaggagggatcgggcaattccggagccatcgccaggtaaaagcgcggcgcgccctggccgatatagctggtgacaatcttcgcctccggctgccgctgcagccagtgctcaattttcgccgccgcggcgctggtctggctaatcgacgacccgtaaggcagctgcacttcaaccagcacttccggacgatcggaggtggggaaaaactgctttttcaccacgctcatgcccaggatcgccacgataaacagcgccaccaccccggcggccacgcgccatttgtgagcaataacccgggtcagcagccgacggaagcgctgatagcgcggggtgtcatacagcgcggcgtggccggccgccgcgggctttctgtccggcaacaggtgcacccccagccagggggtaaaaatcaccgccacaatccaggaggcaatcagcgcgataccgacgatccagaacacattgctggcgtactccccggcggtggactgcgcaaatccattgggcataaagcccacggccgtcaccagggtaccggccagcatgggcgcggcggtatggctccaggcataggccgaggctttgaggcggtcatacccctcctccattttgaccaccatcatttcgatggcaatgatggcatcatccaccagcagccccagggcgaggatcagcgagccgagagtgatgcggtcgaagtttttgccggtcgccgccatcaccacaaacaccacggcgagggttaaaggcaccgccgccgcgaccaccacgcccacgcgccaccccatgctgacaaagcacaccgccatcaccaccagcagggcgacaaagaatttgatcatgaactcatcgaccgcggcgctgatattcaccgactgatcggtcaccttggtcaacgacatgccgagcggcaggctctgattgatgctggccgtttcggcatccagcgctttccccagcgccagaccattccagccctcacgcatcaccacgcccagcagcagcgccggttcgccctgatagcggatcaggaaggtggcgggatcttcataccctcgctcaaccgtggcgacatcggccagtttcagcgttctgccccggcaataatcggcgtgtcgcggatctgctgcaggcggtcaaacgccccatcgaggcggataaagatctgcccgccccgggtctcaatggccccggcggcggtcagcacattctggctgttcagcgcggcaaaaatcgcctctggcgagagacccagagtggcgagacgatcatgagaaaacgagagataaatgcgttcagcctgttcgccgaggatattcacttttttcaccccggatacatgcagcagctgctggcgcagggcttcagcgtcacgcaccagctgccgcggcggctctccccgcgccttcagggcaaagatcgcaaaggtgacgtcggcgaattcgtcattcatcatcgggccggagacgccggcaggcagatttttcgcctcgtcgccgagcttcttgcgcgcctgataaaactgctccggcacctcggaaggcggggtctgatcctgcagcgacagggtgatcaacgccatgccagggcgggtataggtctccgtgcgatcgtaccactttaactcctggagccgtttttccagcggctcggcgacctgatcctgcatctcctgcgcggtggcgccgggccagacggtaatgaccgtcatttgcttgaccgtaaagggcggatcttccgctcgcccgagtccgaagaacgccaccagcccggcgacggagataaggataatcaaaaacagggtcaccgaccgctcgcggacggccagcgcggagagattaaaacgcccggcgctcatggctggctcccggcggcattatgctcgcgtcgttccgccagacgcaccgcctcgccctggtgcagaagatgggcgcccagggcgacgatcggctcgccgggcttcagcgggccggtcacccgcgcggtttcatcatccaggccgagcacagttaccggttgccaggagacggtggtcggacgagaggcaatgcgccagacgccagggccgttacccggatcgtagaccgacgccaggggcaccgccagcacctggcctggcgcctggtcgttgccgatgcgcagggtcacggtagaccccagcggggcattcgccagcgcgccgttcagtacatagcgcgcttcaaaggtgcgggtggtggcgtcagccgcgtccgaaagcaggcgcagggtcgccgtgaccggctgagattcgctgccatagcgtgtcgccagcgcctcgctgccgaccgccgggcgcagcgtctccggcagttgcacccgcgcttcgcgctgccccgcccgcgccaggcggatcaccacctgcccggcgctgaccacctgtcccggctcagcgagggtttccaccaccacgccgtcagcatccgccagcagtccggcatagccggtggcgttttgcgccacattggcctgcgcctgggccgcgctgaggtcggctctcgccgcctctgctgccgcgttaatctggtcgaattccgcggcagagatggcgccgctcgccaccaggccgcgatagcgggccagatcgttggccgcctttttggctcgcgcccgcgcggcatctacggcccgctgttgggactgcgcctgcaaggctagatcagccggatccaggcgcagcagcagctgaccgcgcttgacgctctgcccggtttccacccgccgttcaagcacttttcccgccaccctgaagccgaggtcgctttgggttcgggccactaccacgccggtaaaggcccgcgagccgacctccgcgcgctcgacggtcgccacccggaccagcggcggccggatgcgggggtcgtcatgatcggcaggttcgccgcagcccgcgagggccagcggcaggaggcagacggcaagatggacggcgttgagcctgagcatgggtcaccttaatgaaaagaccggatggtgaccgcattctcagactagtgactaataaagtcaatagtcactaatcagggggagagacttctcaggatcagggaggcaagcagcaccgccgcggtgggcgcggtgtcgagattgtattgcaactgcaccggattgatgaaaggacacatcaccatatacaccgccagggtcgcttcatccagcggggttttgcgctcgaactcacccgcctggcggccttcgacaaggatttgaccaatcagctgctgcagatgaccggcatactgttccgttgaaggccatttatcgcgcgccgcgacggcggcgatgtcgtacagtttgcgatcctcaaaaaacagttcactgccggcctcggtcagcgcccggaacaggcggcgcagtttctcgctggcggacggcgcatcggcgatggcctcgctgacggccaccatgatcttctccagccggctggcgcaaatcgcctcgccaatcgcctgcttggagtcatagaatttatagatataggctttggaaaagcctatcgctttggcgagatcggtgaccgtcgttttctcatagccatagcgactaaagtgcgccatggccgcgtcaagaatctggtcccgaacgctgtggtcatggggaccacggcttgcaggggtgggggtatttttcgtcatccgtttagcttaatgcgatcgttatcgtttgacaacgagtgacgttattatgatttggtcacaataacgccccggtttgcgatccgcttcgccgcgtcacgcctcggtgtttatcgcgccggcgggcagacaacccaggccttgcagcgtctgatacaccgcgctgtcgagcggggtatgcggttccgcgcctaaaaaatcaaccagtttatcgttgcgcaggcgtaccggcagacgccagagatagtgcatctcgaccatttcgcgcagggtggcgttgaagggcgccgccagcttcaccagccaccagggaaaagacttcactaccgccctgccgccatagcgggcgaccacccgctggatcgcctgactcatttcgctgccgtccgggtcccagtggccctgcatatgaaagcgggcgaacggctcaagctcgcgcctgcgggcgagcagcgcggcgatggtggcggcgacgtcgggcagccaggcccactgatgccccacgccgatcgcccccgggtagctaatgatgcggggaagctgaccaggcttgaccagcccctgagaaaaccagttatttccggcgcgtggaccaaaaaaatcgcccgcccgaacaatcaacgcccggccgccgcgctgcacgtaatccttcagcgccagctccatcgccacccggatggcgcctttgcgggtcaccggctgttgtgcggcctcttcagcaatcagtggaaaggaatccggtccatagttgtagaccgtgccgggcaggactacaagcgcccgctgccgttcggcagcctgcagggtgttgcgcagcataggcagtacctgttgccgccagtgccggtagcccggcggattcaccgcatggacgatgacgtcgcaaccggcagccgccgccgcgacctggccgccatccagcgcgtcgccggctatccactgcatgccatctgcgggaccgcaaatctgagcgccgcgcttcagcgcccgaacctgccagttgtctgccaccagccggcgcgccacttccccgccgatgcccccgcttgctcccagaataagtaccttgccgctgctgttcatcctctttccccgttcgctaatggatgcttgacagcctacctgcggctcatatcaaatgaaattgcataccatcgtcgagcggctatacatatttgtatgaatacctctattccctgggagtggtaccgaacctttctcgccgtcctgcaggaaggctctttatcgggcgcatcgcgtaccctgaacatcactcagccgacggcggggcgccatattgccgggctggaaaacgccctcggccaggccttatttacccgctcgcaaaccggcctgctggcgaccgacgcggcgctggcgctgcgggtgcacgccgaggcgatggacaataccgcccgggcgctggaacgcacggcggctaacttcagtcgcgacagagccgagctgcgtggcgtggtgcgggtggccgccagcgaggtggtcggcgccgaggtgctgccgccgctggttgcccggctcaggcaggcgtgcccgaatatcgtcatcgaactgatgctctccaatcggtttcaggatctgcttcaccgggaggcggatattgcggtgcggatggtcgccccgcagcaggagcagcttatcgcccgccgtctcggcaggatcgagcttgggttacatgccaccgccgcctacctgacgcggcagggcctgcccgcgactctcgacgatctggccagccacgcgctaattggttttgatagcgccacccctctcgtgcgccgggcgctgcaggcttacccccgttttcagcgcgaggcgttcgcgatgcggaccgatagcgacctcgcccagttgagcctgatccgcgccggagcggggatcggcatctgccaggtgcctcttgcggatggcattattcccctgcagcgagtgctggcggccgacttttctctgtatcttgatacctggctggtaatgcatgaggatctgcgccacagccctgcctgtaagcgggtatttgattttctcgcccaggggttgcaggcgtatattcgtggcccactggcgagctgacccaccccatcgcgcggtcatttcattgcctgcggaaatagtcactcattgacactgtaaatatggcattgtataaaaccccgccccaataatgagtttcatttgcattactcccatttgctggtcatccactcgcctgtttacaaggatagcgtttaatgaagaaggtcctttgcgcgttaggcttgatgttcaccgccgtcagttccgcgctggcaacaacctaccccctgacgattgaaaactgcggctatcaggagaccttcacccggccgccggagcgcgtggtcgcgctggggcaaaatacggtcgaaattctgctgctgctcgggctgcaaaagcaggtggtcgccagcgccttttggccgaccagcgttttaccgcagctggctgagcaaaacgcgaagattaaaaccttgacggtggaaattccgagcctggaatcggtgctggcgcaaaatcccgatttcgttcccgcccagttgccgctgctgctggggccggaaagcaaagtcgccaggcgtgaagatctcgccaccgtcggcgtgaacagctacgtctcaccggggatgtgcgccaccaaaaaggccaccggcgatatgtacggcagccggcaaaagctgtgggatatgacctggctgtatcaggagattagcgatttttcccgcattttcaacgtcgaagatcgtggtcaggcgctgattgccgatttcaaaaaacgtgaagccgacctgcgccaggagtttggtaaaagcaaaaaggatctctccttcgtcttctggttctccagcgcctcaccttcggccgatgcctatgtcggcggcaaaaacagcgcctccggatttatcgccagcgtgctgggcggacataatgcgattacctccgaaaccgagtggcccacggtgagctgggagagcattattgccgccaacccggatgtgatcgtggtcgccagcctggatcgtaaccgctgggcgctggataaggccgaggagaagatcaaattcctcaaaagcgatcccgccgtcagccagctggaggcggtgaaaaaaggccatatcgtggtcatggacggtcaggcgatgaatccgaccattcgcacgctttacggcgcggaacaggtgggcgagcagctgagaaaaatggggctgaactgatgagcgtcgccgcgattgagacgcgccgcagcatactgctcaccggctggtgtgtactggcagcgatcgtgctggcgctggtgatcgctgttggcgtcagcgttggcgagctggccatcccgctgcagcatgtcttttatgctatcagcaacagaaccggcttaaccgctgagccgctcaaccgtatctatgagagcgttatctgggatttccgcctcagccgcgcgctggtcgccgcctgctgcggcgcaggcctcgctatctgcggcgtcgtgctgcaaagcctgctgaagaatgccctcgcggaaccctacgtcctcggcgtctccgccggggcctccaccggtgcggtgtcgatcgtggtgctgggccttggcgctggcgcaatttccctctcggccggggcctttgccggggccttcgccgccttcgcctttgtcgccttgctgactaacggcgcgcgcggcggcaatgagcgtacgattcttgcgggcgtcgccgcctcgcagttatttaacgccatcacggcctataccatcagcacctccgccagcgcgcagcaggcgcgcgatgtgatgttctggctgctgggcagcttcagcggcgtccgctggcccgaattccagttggtcatcgtggtggtgctcgcgggtctggcggtctgcctgtggtatgcccgggcgctggacgcgttcaccttcggcgacgatgccgccgcctcgctggggattgctgtgccgcgcgtgcgcctgatcctcttcaccactgcggcgctgatcaccgccaccatcgtcagcatggccggctcaatcggctttgttggcctggtggtgccccacgtgatgcgtttcttctttggcccgctgcaccgaacgttgctgatcgccagcgcgctggcaggggcgatattgatggtactggcggacattgcgtcgcgcctgctgattgccccgcaaagtctgcccgttggggtagtaaccgccctggttggggtgcctttctttgccgtgattatctaccgctcaaggaataagtgatgagtatttgcgctgaaaatatcacctggaaggcaggcaaaaaggtcatcgtcaataatgtctcgctgcgggtgccgcgaggcgaaacggtcggactactggggcccaacggctgcggcaaatcctccctgctgcgcgttctggcgggcctgcgccgcccggatgcaggtcgcgtcaccctcgacggccaggatatcgcccggatggcgaaaaagcagctcgcccgccgcgtggctttcgtcgagcaacacggcatgaccgaggccaatatgcgggtgcgcgacgtcgtgcgcctgggacgcattccccaccactctccgttctcaaactggagcgctcaggatgacgaggcgattgccgccgcgctgcagcgggtagcgatgctggagaaaagcgaacagggatggttaagcctctccggcggcgagcggcagcgggtgcatatcgcccgcgcgctggcgcagagtccgagcgaaatcctgctggatgagccgaccaaccatctggatatacaccatcagatgcagttaatgcagttgatcagcgagctgccggtaaccagcattgtggccattcacgatcttaaccatgccgcgatgttctgcgattcgctgatcgtgatgcagcaggggcagatcctcgccagcgggacgccggaggagattttgtccgaagcgctgctgtgggacgttttccgggtgaaaaccaaaatcgagatctccccttaccacggcaaaaagcacattcatttcatcgtttaggttgggcggatatgcctcttttctccctgcgccctgcggcaaccctctggcctccggtgttactgggaagccagttcgtttttaatattggcttttacgcggtcgttcctttcctcgccctcttcctgcgcgacgacatgctgctctcaggcggacttatcggcctgatcctcgggctgcgtaccttctcccaacaggggatgtttatcctcggcgggacgctggccgaccgctatggcgctaaggcgatcattctcgccggctgcgtcgttcgcgtcgccggttttctcctgctggcgtgcggggcgtcgctgtggcccattatcctcggcgcctgcctgaccggcgtcggcggcgccctgttctccccgtcgatagaggccctgctggcgcgggccggcaccctcagccaggccaacgggaaacgcagccgcgccgagtggtttgcgctgtttgcggtatgcggtgaactgggagcggtgatcggcccggtggccggaggcgtgctgagcgggatcggctttcggcatatcgccctcgccggcgcgggaatatttcttctggcgctggcggtgctctttttctgtctgcccgccgacgggcacacgacaacaacgcgcagacgagtcccatggtggacgcctttgcgccagccgcgctttgtcgcgtttattctcgcctacagctcatggctgttgagctacaaccaactgtacctcgccctgccggtggagatccaacgttccggcggccgcgagcaggatctggcgccgctctttatgctggcctcgctgttgattatcaccctccagctccctctcgcccgcttcgcccggcgaatgggcgccgtgcgcatcctgccggtgggctttctgctgctgtcggcttcctttgccagcgtggcgttattcgccgccgccccacccgccgaaggttggctgcggttaatgccggcggctggttttgtcacgctgctcaccctcggccagatgctgttagtgcccgcagccaaggatctgatcccgctgttcgccgaggagtcgacgctgggcgcccactacggagcgctcgccaccgcaggagggtgcgcggtgttagccgggaatttactgctcggtcatttacttgaccaggcgctcattccctcgccgcaggcggtttatccctggcttctgctggcgctgtttccgctgtgcagcgccgtcgccctgcgggcaatctgtcgcccgctggcggcaacatgacgcagagcgggcaacagcccgctctggaagtgaaccgacgataaagtacatcgcctggggaagataacgggcgcgccccgccttactttgccgccagctcgcgacgaataatctcggcgccggcgctcagggcgtgcagtttgccggtcgcgacatggcgcggcagcggcgccataccgcagttggtggacgggtagagtttgtcggcatcgacgaacgccagcgccttgcgcagggttccagccacctcttccggggtttcgatcgcatggctggcgacatcgatcgccccgaccatcacctttttaccgcggatcaactccagcagatccatcggcacgcgcgagttgtggcactcgagagagataatatcaagggacgatttctgcagctgcgggaaagcctcttcatactgtcgccactcggagcccagcgtctttttccagtcggtattggccttgatgccatagccgtaacagatatgcaccgctgtctcacacttcagcccttcggtggctcgttctaaggcggcgatcccccagtcgttgacctcatcgaagaagacgttaaaggccggctcatcgaactgaataatatcaacccccgcagcctctaactctttcgcttcctgattgaggattttggcaaattcccaggccagcttttcccggcttttgtagtggttgtcatacagcgtgtcgatcatggtcatcgggcccggaagcgcccatttgatcggctgactggtgagctgccgcagatagcgagcgtcctccacgaagaccggtttctggcgctccacggcgcccaccaccgttggaacactggcctcatagcggttacgaattttcacgatctcgcgtttggcaaaatccaccccgctgaggtgctcgatgaaggtggtgacaaagtgctgccgcgtttgctcgccgtcgctgacaatatcgatcccggcccgcagctggtcgtcgagggataaccgcaaggcgtcgcgcttgccggccagtaattcttcgctggacagtttccagggcgaccacagggtctctggctgcgccagccaggaaggtttcggtaaactgccggcggtcgatgtcggaagccatgttttcatagtcattagccttttatatgggtttagcaaagcgcgaaattagcagaccattgctcaagcaacgtcttgtgcgggttgataaaatgttgttgtgtaaatttcccctgctcaatcgccaacaggctgcgctcttcccggtcatagacgatttttgttaatgaatgatccaggtggctgagattgggctgatagtattgccccgccggggagttggcattgtagatctccgggcgatatattttctgaaacgtctccatcgtgctgatggtggcgatcagttccaggctggtgtaatcgctgagcagatcgccggtaaaataaaaggccaacggcgcgacgctgttttttggcataaaatagcgtacctgcagacccattttgctgaaatagcgctcggtcagcgagacgccttcctgagcatattcaatgccgaggaccggatgttcgttaccggtgcgatggtaaacatctttactggagacgctcaggcaaatcaccggcgccttgctgaagttggcgcgccaggcgctggattgcacaaaatccttaaagatattgccgtgcagctcgccaaagttttccggtacgctgaagcgactctggtccttattatgttccagaagcagtacgctaaaatcgtaatcccgcacataggaggagaagttattgccgacgataccggcatgacgctccccgctctttttatcgacaatatgcgtttgcaggatctcaatcaccgggaagctggcgctatcctgagcaatattcatctcgacagaaataatatccagttccaccgcatagcgatcgttatggggattatcccagtgggccaggctattaaaacggttattcatcatgattaacgtattgcgcagattttcctcacggttcacccctctggctaaattagcgaagttggtggtaatacgcgtattttccgcagggttataattttcatcaaaccgggtgcgcttaatcgtataggtaaatttattattcatggcgattgtccatcctgatggcgggcataaagcgaacccggcggaatactctccaccagcctggcgacgcggagtcaggccgggcgcgcttcaaccggtaaatgttgttgattcgttaatgaacctatttttgccagagtcagcgctggagggaaagcgacttaaattcaatgcaacatgagccatcctcatgttgctccaggcggtggccgatggccgacgcaggccgacaatattagtcaataaacgtttgttcaatggaagtaggcagggtacactctttaaccactataagatgggcttacctgcccgccgtacccgtttagctggagcttttgtcgtacagaatgattgttgatatcagtattatgtcgatgtgcatggccgtactgctgattatgagcgtactgctgaattaagaggctcccgaacgcaatgacactcgctctcatctgacctccacattcgcgaggaaaaaagaagattcagaggattcgcgccgcctgggattgttccgcctgccggcaccctctactcttttgggacttgcttattgaggaatcccggatgaaaaaagctctgcttgccctgttcgctatcgccaccgttaccgccgccagcgcctttgcggctgataaaaccgacgtcccggcgcctgtcgtcgataacggagtccgcccgccgatggagagggatcgtggccccctgccgccgttcccgccgcagcttccgccgcacagaccggtgctgttttcagccacggtagcaaccgatacgccagcggaaacaattaacaaactgaccgcgctgatccccgccggccaggcgaaacactacgaagtgcacgttgaggtggtgccggttggcgagggaaccgacagacaatagcccaggggatatctacgctgtcatctgtcagcaataaaaaagctgccgcatttcgcggcagcttttatgtacttatttacagctgagcagctgaaaattagctacgcactttccggtaaataaacagtaccaccagcgcaccgataaccgctaccacgaagctgccgaaattaaacccatcgaccttaccaaaaccaaacagggtactgatccagccgccgaccacggcgccgatgatccccaaaataacggtcacgataaatccgccgccatcttttcccggcataatccacttggctaaaataccggcaataagtccaaaaatgatccaggaaagaatacccatggttaaccgtcctcttgttacctttaagcatttagtattgaaaagagtagcataaataacgagagtggatcggtaataatataaatattagataattccctgccgacgcccggctgatcttgtgacaacctctctggctctggcaggccggctctcgcttattaccttaaaaaaagggaggctattcgcctcccgccatgcggcttatattaccgcggtggttagtcgtgatgaacaacataaccgcgactgttcgtcgaagatttcaatttgccagacctgatggcgcgtcccgacgtgcagcgctttgcagacgccgcgcacccggcccccgcgcgccgaacggatgtggttggcgttaacctccagccccaccaccttttgttcgccttcgctgcacagatagcctgccaccgaccccagggtctccgccagcaccaccgacgctccgccgtgcagcaggccaaacggctgctgtgtgcggctatcgaccggcatagtggcctccagcgtatcgtcggtaacggtctcaaagcgaatatcgagcagccctaccatgttcccctcaccgagccggttgagctgctccagcgtggcctgacgtttccaaatcatccgattatctccagtaacgcctgcagcgggtggcgaacgccgctgccttcaatacgcttcacctgactgcggcaggagtagcccgtcaccagacagcggtttcgcggcagccgctgcatcgcctgctgccaggagagcgcgtaaatggccaacgagttggcgtggtttttcacttcatgaccataggtgccagccatcccgcaacacccaacgctgacgttttccagcttcgcgccgaagtgggcaaaaatatctgcccactgctttgtcgccgccggtagcgcggtcacttcggtacagtgaccgaacaggtaccagggctcaccgcccagatcgggacgggcgtcgctggttagggccttcggcaaccactcatggactaacagcacctggaaatcgccgcgcttgtcgccgagcgtctgcttgtactcatcgcggtagcagagcaccagcgccggatcgacgcccaccagcggcatgcccagctgcgccacgcggttgaggaagtccgccgtcttctgcgcggtgcgcgcgaagcgggtgaggaagcctttgatatgctgcgccttgccgttcggcgagaacggcaggagcaccggctgatagcctaaggcctcgaccagacggataaagtcggccaccacctgggcgtcgtagtagctggtgaagggatcctgcaccaccagcaccatcttcgctttctgctcggcgctcagcgcttcgagctgctcaagggtcatattggcggaacggtggccggccatctgctgcttcagcgacggcgccgagagcagcggcagatcgaccatcccgatatgcttctccgacagctttttcagccaaggctggttaataaaaaagttaaaggtcttcggcgcctgcgccatcagcggcgcataagattcgaccgaggccaccagatgatcgcgcaccggccgcagatagcggctgtggtacagctgcaggaagcgcgagcggaactcgggaacatcgattttgatcgggcactgggtcgaacaggctttacaggccagacagccggacatcgcctctttgacctcatgcgagaagtcatattcgcctttgcgcgcatgccagctgttgcgcgtgcgcgccaccagcgagcgcaggctgacgccctgctccggcagcgccttctccagctggttgggatcgacgccgcggtcggccagcaggcgcagccattcccgcaccagcgtcgcccgccctttcggcgagtggatgcgctggttgctgactttcatcgacggacacatcgggctcttgacgtcaaagttgaagcacagcccgttgccattacactccatcgccccacgccagctgctgcgcaccgcgatggggatctgccgatcccaggtgccgcgcttcgccgcatcgactttcatcatcggcgcgtcgataccttccggaggacagattttccccggattcaggcggttatcgggatcgaagaccgctttgatcttgcgcagctcggcatacagcgtctcgccaaagaaggccgggctgtactccgcgcggaaccctttgccatgttcgccccacagcaggccgccatacttcgccgtcagcgccaccacatcgtcggagatctgcttcatcagcacctcctgctgcggatcgcacatgtccagcgccgggcgcacgtgcagcaccccggcatcaacgtggccaaacatgccgtagctcaggccgtggctgtcgagcagcgcgcggaactcgacgatgtaatccgccagatgttcgggcggtacgcaggtgtcctcggcgaaaggaataggcttggcggcgcctttggcattgcccaacaggccgacggccttcttgcgcatggcatagatgcgctccacgccttcaagatcgtgacagacctgccagccaatgacgcccgcctcgctggcggccatcagctcgtccagccgctggcacagggtagcaacctgctggtcaatcagcgccgcgtcatcgccggcgaattcgacgatattgagcccgagcatctctttatccggtacgtcggtgatcagttcgcttaccgagtgccagacgatatcctcgcgcgccagattgagaactttagaatcgacggtctccaccgacagggctttcgcttcgaccataaagggcgcattgcgcagcgcagagtcgaaggagtcatatttgacgttgaccagacggcgcaccttcggcaggcgggtgatatccagccgcgcttcggtaataaacgccagcgtcccttccgaaccggttaaaatacgggtcaggtcgaactcgctcatctcatcgttaaagacgtgacgcagatcgtatccggtgaggaagcggttgagtttgggaaacttatcaatgatcaggtcacgctgcgccttgcagcgctggtagaccgtgttgtagatccggccaaccgtcgagggggtattgcccagcgtctccgccagcgccaccggcaccgcctgggtatcgaggatatccccgcccatcagcaccgcccgcaggccgagcacgtgatccgacgttttgccgtacaccagcgatccctggccggacgcgtcggtgttaatcatcccccccagcgtggcgcggttgctggtggatagctcaggcgcaaaaaagtaaccatagggtttaagaaactggttcagctgatctttgatgaccccggcttcaacgcgcacccagccctcttcggggttgatttcgataatgcggttcatatagcgggacatatcaacgataatcccgccgttcagcgcctggccattagtgccggtgccgccgccacgcggggtgaaaatcagcgatttaaaacgcggttcggcggcgacgcgcgccagcagcgccacgtccgccgtggatcgaggaaaaatgaccgcatccggcagcagctgatagacgctgttgtcggtggccatcgttagcctgtcggcatagctggtggcggtatcgccggtaaaaccctgttgctccagtacctgcaaaaaattcagcaccagttgaactacccctggcgcctgagaaatttgtgggatcatcacgcttgaccctgcctgactatgttgtgtttgaaaatattgtgttggtgctaactaaacgtttgcgtagcgcattcaactttttatcacatttttttcatatgcgcccacgtgttttctgtgcaaaatcagcccggcaaaattaytgatattattatcagtatatggatttacgcggcgccagctgtttggcgcgactggaaaggtaaaatttctctatgattaatccccatcagcctcgggacattccgcaaatactgctgtcggtgctgttcctggccctgattatcatatcctgcctgtgggttgtgcagccgtttattctgtccttcgcctgggccggtacggtggtgatcgccacctggccggtgctgctgcgtctgcagcgtgtgctgttcggcaaacgactgctggcggtgctggcgatgaccctgttgctgtttctgctattcgttattcctatcgctctgctggtcaacagcctggtggataacagcgttccgctgatcaaactcatcagcagcggaaatgtgacgctgccggatttcgcctggctcaacagcgtaccgctggtcggcgataaactgtactccgcctggcacggtctgctggatatgggcggctcggcgattatggccaaggttcgtccctatattggcaccaccaccagctggtttgtcggtcaggcggcgcacatcggcaagctgctggtctactgcggtttgatgctgctgttcagcgcgctgctctactggcgcggcgagcaggtggcctatggtttccgctacttcgccacgcgcctcgcggccaaacgcggcgacgccgcggtgctgctggccggccaggccgtgcgcgccgtggcgctgggcgtggtggtcactgccctcactcaggcggtactgggcgggattggccttgctgtctccggcgtgccctacgccgctctgctgaccgtggtgatgatctttacctgtctggttcagctcggccctttactggttttggtgccgtcgattatctggctttactggagcggggacaccacctggggcaccgtgctgctggtgtggagctgcgtagtcggcaccatggacaacgttattcgtccggtgctcatccgcatgggcgccgacctgccaatgatccttatcctcaccggcgtcattggcggcctgatcgccttcggcatgatcggcctgtttatcggtccggtgctgctcgccgtctcctggcgactgtatgacgcctgggtgcatgaggtgccgccgccgccgaaagaccctgacgtcgtccttgaagagctcagtgagctggaggccggtcgcaagtaatgcctggcaggcggggagacccgcctgtttctttgcccgcatattgttaagcaaaatttattgatcgccggcaatgcgctggccccgcgtgcccttcacctcgctttcctcccccggtccttcacaacaatttaactattgagaggaatctgatcgacggcaaaggccccgctgcctactattagctcacggttataaatcaacaccttgatttataagcatggaaatcccctgagtgaaacaacgaattgctgtgtgtagtctttgcccatctcccacgatgggcttttttttgccctgcgcatcacgacaccagatagcctgacaccggtaaaaaaaatccccggcatcgctgccggggatcggtcctgtcagggcgaacttattttttcagttccgccagacctaaccaggtttgtaccacggtatccgggttcagggacaagctatcaatcccctcttccatcagccaggcggcgaaatcctcatggtcagacggcccctggccgcagatgccgacgtatttaccctgtttcttcgccgcgcggatggccatcgacagcagggctttcaccgcgtcattgcgttcatcaaacagctcagaaaccacaccggaatcgcggtccagaccgagcgccagttgggtcatgtcgttcgaaccgatggagaagccgtcgaagtactcgaggaactgctccgccagcaaggcgttcgacgggatctcgcacatcataatgatcttcagcccgttctcgccgcgcttcagcccctgacgctccagctcttcgaccaccgctttcgcctgggcgacggtacggacgaacgggaccatcacttcaacgttggtcagtcccatgtcgttacgcacgcgcttcatcgcttcgcattcaagggcgaaacagtcgcggaagctttcggaaacgtagcgtccggcgccgcggaagccgagcatcgggttctcttcttccggctcatagcgctcgccgcccaccaggttggcgtattcgttcgatttgaagtccgacagacgcacgatcacccgtttcggatagaaagcggcgccgagggtggcgatcccttcggtcaggcggccaacgtagaactctctcggcgaatcgtagcctttcatcagctcgcggatttcgttctgcaggcccggctcctggtcgtcaaactccagcagcgcgcgcggatgaacgccaatcatgcggttgatgataaattccagccgcgccagaccgacgccttcgttcggcaggcaggcgaagtcgaacgcgcgatccgggttgccgacgttcatcatcaccttcagcggcagatccggcatgtcgccgacgctggagctcttgacgctgaagtcgagcagctcggcgtagacatagccggtgtcgccttcggcgcaggagacggtgacattctgattttcctgaatgcgatcggtagcatcgccgcagccgaccactgccgggatccccagctcacgggcgataatcgccgcgtgacaggtacgcccgccgcggttggtgacaatcgccgaggcttttttcatgatcggttcccagtccgggtcggtcatatcggtaaccagtacgtcgcctggctcaatgcgattcatctcgctgatatcgtggatcaccttgaccggaccggcgccaatgcggtggccgatggcgcgcccttcggcgatgatctgcccctgagcgtggagggtataacgctccatcacctggccgcgggaacgcacggtttcaggacgcgcctggacgataaacagcttaccggtgtggccatctttcgcccactcgatatccatcggacggccgtagtgcttctcgatctgcaccgcctgcttcgccagctcctgcacctcctcgttgcttaacgagaaaatatcgcgctgcgcctgcggcacatcttcgatacgcacctgtttaccgtgctcctgggtcggcgcgtaaaccatacggatctttttcgaccccatggtgcggcgcacgatcgccggacggccagcggccagcgtcggtttgtggacgtagaattcgtccgggttcaccgcgccctgcaccaccatctcgcccaaaccccacgccgaggtgataaacaccacctggtcaaagccggattcggtatcgatggagaacatgacgccggaggaggccagatcggagcggaccatcctctgcaccccggcggagagcgccacgccgcggtgatcgtaaccctgatgcacgcggtaggagattgcgcgatcgttaaacagcgaagcaaacacgtgcttcacggcaacgagcacggcgtcaaagccctgcacgttgaggaatgtctcttgctgcccggcgaaggaggcgtccggcatatcttccgcggtggcggaagagcgcacggcgaatgaggcctcggcgtcatcggcggacagcaggtcataagcatcgcgaatcgcgttttccagttcgctctggaagggggtatcgatgatccactgtcggatctgcgcgcccgctttcgctaatgcggaaacgtcgtcaatgtcggtttcatccagcagcgcatagatgcgctggttaacaccgctttggtccaggaactgattgaaagcatcagcggtggtggcaaacccgttaggtacggaaacacccataccggacagattcgtaatcatttcaccaagggaggcatttttgcccccaactctgtctacatcattcatgccgagttggttataccaaagcaccagcggtgacgagccattgttggacatcgagacaatccttttgtgatttaataccagtgaaaaaaatttcacgatcgactgcaggattatcctgacatatttatgaagctgaaaaaaacggtgaatcgttcaagcaaattattttttcatttttcggactgttcccccgatattgctaacttgatgatttttaggaattctgatggaaaacgctggaaataacggcgacaaaaagaaaatgaaccacccttttcataaaaaacaaaaatagcgtttcaattttaacaagagacaaatcaaacagggatatgcttaaatttaatatccgctttcaggcaattaaactcattataccggatggtcaaaatggaaagtgctgtagatcgccacgtattttatatttctgacggtaccgccattacggcggaggtgctggggcatgccgtgatgtcgcaattcccggtcgccatcagcagcgtaaccctgccgtttgtggaaaatatcagccgcgcgcgggcggtaaaggagcagatcgacgccatttatcagcaaacgggtattcgcccgctggtgttctactccatcgtcatcccggaaatacgcgacattattctgcaaagtgaaggcttttgtcaggatatcgtacaggcgctggtggccccgctgcagcaggagctcaacctcgacccgacgccggtggcccaccgcacccacggcctcaaccccggcaacctgattaaatacgatgcgcgtatcgccgccatcgattataccctcgcccatgacgatggcatctcgctgcgcaaccttgaccaggcgcaggtgatcctcctcggcgtctcgcgctgcggcaaaacacccaccagtctgtatctcgccatgcagtacggtattcgcgccgccaactatccgtttatcgccgacgatatggacaatctggtgctgccggcctcgctgaaacccctgcagcataagatgttcggcctgaccatcaatccggagcgtctggcggcgatccgcgaggagcgccgggagaacagccgctacgcctcgctgcgccagtgtcggatggaagtgaccgaagtggaggccctgtatcgcaagaataaaatcccctgcctgaacagcaccaactattccgttgaggaaatagcgacaaaaatcatggacatcatggggctgaatcgcagaatgtactaacacactagtacattattaaaaatttgtttatgctatcacccgtggcctatacaggatcatgccctgctcttgcaataagcagggattggtttatcgtgatgcgcatcacttcccggcattttcgccgcggaagaaacagatttttgagaccccaatgaataaaacagacgaattgcgtaccgcgcgcattgagagcctggtaacgcccgcggagctggcccagcgccatcccgtgacggccgacgtggctgcccacgtctcggcctcccgccgccgaattgaaaaaatcctcaacggcgaagaccgccgactgctggtgattatcggcccctgctccattcacgacaccgacgcggcgctggagtatgcccgccgcctgcagaccatgcgcgagcgctatcagccgcagctggagatcgtgatgcgcacctactttgaaaaaccgcgtaccgtggtgggctggaaaggcttaatctccgatccggacctcaacggcagctaccgggtcaaccacggaattgagctggcgcggcgcctgctgctgcaggttaatgagctgggggtaccgacggccaccgagtttctcgatatggtgaccggtcagtttatcgccgatctcatcagctggggggccatcggggcgcgcaccactgaaagccagatccaccgtgaaatggcctcagcgctctcctgcccggttggatttaaaaacggcaccgacggcaatacgcgcatcgcggtggacgccatccgcgcctcccgcgccagccatatgttcctctctccggacaagcaggggcagatgacgatttaccagaccagcggcaacccgtacgggcacatcattatgcgcggcggcaaacggccaaactatcacgccgaggatatcgccgccgccggcgaggcgctgcgtgaattcgatctgccggaacagctggtcgttgatttcagccatggcaactgccagaagcagcaccgccgtcagctggaggtgtgcgccgatatctgtcagcaaattcgcgcgggctccaccgccatcgccgggattatggccgaaagcttcctgcaggaaggcactcagaaagtggtccccggccagccgttgacctggggccagtcgatcaccgacccctgcctgagctgggaagacagcgaaagattattgagcgagctggctgcggccaccgccacccgcctgtaaccgctccgcccgccgcgcctgcggcgggcaattctcttcgctgactcccctaccaaatccggtaacacgataaataacgcttgccgtcaaaaacaacattattgataatgattatcattgttgccttgatttttattctgagagctatgacgcgtatggataacactgccacagctgaaaaaccaaaagacaatgccccttatcccgtggcgacggacagagagatcagcagtcgggttctgttaggcagcgaaggacgagtagtgattgagcatggcggccagcgctatctgctgcgccagacccacgccgggaagttaattctgaccaagtaagcgccccgctgaacgcggggcgaggcaagttagctcgagcagctgacttccagacgtttcccccagtccggcgggcggcggacgtagtcgtcctcgcgatcggtaaaggggtctgccagcgcggcatgcaggcgctccagctcgtccatatcgcccgcctcagcctgctcgatcgcccgctgcgccagccagttacgtaacaccagcgccggattcacgccctgcatcctctgctggcgctgcgcgtcgtccacctgttcatcacgcagccgcgcacgatacccggcaaaccagctgtcaaaggccgcgcggtcgataaactcatcgcgcagcggcgatgcggcgctgagctgttcgctgtggctcagcaggcggaacgtccgggtatagtcgctcttctcgcggatcatcagggcaaacagcccgtccagcaggtcgttatcccctttctgctggctgaacaggccgagtttatcgcgcatccgctggccataagcggtcagcaaggcgtgctgatactcatccagcgccgcgtttaacgcttcagcgctgataaacggcgacagcgattgggcgagacgctgcagattccacagccccaccgccggctggttttcaaaactgtagcgcccctgataatcggagtggttgcagatgaagtccggttggaaatcgtcaaggaagccatacgggccgtagtcgatggtcagaccgagaatcgacatgttgtcggtattcatcaccccatgggcaaagcccacggtttgccagctggcgatagtctgcgcggtacgcatgacaatgtcacggaaccataacaggtacttatccgcctcatcctgcagctgcggccagtggtggcgaataacatagtcggccagttgctggaccttctgcggctcacggcgatagtaaaaatgttcgaaatggccgaagcgcacatggctctcggccacccgcatcagcatcgcgccgggctccacgcgctcgcggtagaccggggtatcgctggtcaccatcgccagggcgcgcgtcgtcgggatccccagagcgtgcatcgcctccgacgccagactttcccggatcgtcgagcgcagcacggcgcggccgtcccccatccgcgaataaggagtcaggccggcgcctttcagatgccagtcgtaacggcggccatccgccagctgctgctcgccgagcaggatcccgcgtccgtcgcccagctggccggcccaggcgccaaactgatggccgctatatacctgcgccagcggcgacatgcccggaagcagcgcttcgccgccccagacaccggccccgctttcaggcgcaaacagggcgtcgggcacccccagctgttgcgccagcggggcgttgcgccagatgagtcgggcgttatccaacggcgttggtgacagggaagtgtaaaagtccggcagttcatcccgccagtgggtggtaaaagaaagggtcatggttcctcctctctccagtgtagtgcctggaacagcggattaacacgggcggagtgcagggttatcggcataaaaaagggaagcgttcgcttccctcttgcttctgaatgacgtcagattcgccgcgcctgccagaactttttgttccagtagacgttgtccagcgaggaacgggtgacgccctggctggtggaggcgtgaataaattggttgtcggtatcgtagatgccaacgtgcaggccgctctcccctgagccggttttgaagaacaccagatcgccgggcagcagatcgcgcttatcgatgcgggtgccgatttccgcctgctcgcgggtttcacgcggcagctggagggcaaatttatcgcgaaacgtgcgcaccacgaagccggagcagtcaacgccgcgcggcgtcatgccgccgtagcgatacggcgcgccgcgccagctgcgcagctgctcgttcagattcgccaccaccgtaatggagtctgccagccgaggattcggcggcggtgcccgatggctgctgcagccggctaaaattaacgccgccgccaacatgaaccagaagcgcatttcagatgatccctctgtccctagtctctttatcgcaataatttagcttgtttatcaataaagtgacaagataactgcgtgctactgtgacgcgatgagcataatatgaccggccacctcaacgcgctggaacgggatcgcataggcagcggttaaattttcctcattcagcacctcggcggtctccccgcaggcgatggcttccccctggcagagcagccagctctgaccggcgtggcgcagggtatggttgagatcgtggctgctcatcaccaccgcaatccccgcagcgctcagctcgtgtaacagccgatccagcgccgcctgctgggccacatccagactgttcatcggctcatccagcagcagcagctgacccgcggaattactcaagggatcgatctgcaggatcactgccgccagccgcacgcgctgccactcgccgcccgacagctgattgaccggacggcccagcttattgtccagaccaagcctggccgcgatatcgctcagacgggcgctatcaccctgctgctgcatatgcagcgccaggtagtgccataccggcatggcgaacggcggggtctggtgttgacacagatatccgcgacggcgcgccagctccctcgccggccactcgtcaagcagccggccgttaaaatgaaccgtgccggggccgtcggacagccccgccatgcgggtcagcagcgtgctcttccctgcgccgttcggccccaccagatggacaatctccccggcgcgaaaggccgcagaaaacggggccaggcgccccgccgcttctacatcctgtagctgcatcagaaacgacattattgcgccagcgctcctttaatcgccgccaccagctgcggatcgtccggcgtcatatccggagagaagcgctgaatgacgttgccctggcgatcgacgaggaatttttcgaagttccacagaatgtcgtccacatacagcggtgcccggcctttgctggccatccgctcataaaaaccgctgccttccgggccaccgctttcggcgcggcggcaatcagtttttgatagagcggcgcgcgatgttcaccgttgacgtcaattttgctaaacagcgggaaggtgacgccgtaggtagtgctgcagaaggtcttaatctcctcttcactgcccggctcctggccgaggaactggttgcaggggaaccccagcacgctgaagccctcggcggcaaactgcttttgtagatcctcgagttgctcatactgcggcgtcaggccgcatttcgaggctacattgacgatcagcagcaccttgccggcaaaggatgccagggtggttttctcgccatcaatggtcgtcacttcggtattcagaatgtcatgttgcatagcctgtcctcaatggataaaccggtttccggtgaaggtgatccctttctactgtagcggattcagcgcccgccattctactgccattccccccgagttgtcgcatgatgtaacagcgcttcgctggccgccggcaacatgaaatcctctcaattgggccgtcgaccatttccgtgtacagtgttccatgaatgtaatatggtttcgttaattgttaatttaagagagttttagtgatgaagaagttgtttagcctggcgttaatcgccacctctgtcgccctgctgagcgcctgctccccggatgaagataataaagtaaaagtcgctatcaataccgggccggacgaagccatctggaaagtggtggagcaggtggcgaaggataaataccacctcgacgtcgaagtggtctccttcaatgattatgtgctgcccaacgaagcgctgaacaacaaagatgtcgatgccaacgccttccagaccctgccgtaccttgaggcgcagtcgaaagaacgcggctataaatttgcggtggtcggtaaaacctttgtcttccctatcgccgcctattctcaccggatcaaaaatatcagcgaactgcccgaaggggcgacggtgaccatctctaatgaaaccaccaccctgggccgcagcctgctgctgcttcaggcgcaggggttactcaagctgaaaccgggcgtcggctatttacccaccacgctggatatcatcgacaatccgaaacagctgaaaattgttgaagtggataccccgcagctgacccgtacccttgacgatccgaacgtcagcctgtcaatcattaacaccaacttctccgcccaggcgggcctgtcggccgcccgcgacggtctgtttatggaggggccggattccccatacgtgaatgcgatagtcgcccgcgaggataataaggacagcaagaaaattcaggaattaaaagccgccttccagaccagcgaagtcgcggaaaaagcgaaggaagtctacaaaggcgacgcgatcaaaggctggtaagcctgaaccggcgccgtccctgccgacggcgccgcgctatccccgccccgcgaacgcagcagcaaccagataaagaccggcgcgcccagggtcgccgtcaccacgccaatcggcagctctgcggcggaaagcgccagccgggcaatgatatccgcccccagcaaggcgcttgccccggccagcatacaggccgggagcaacacccggtgatcgctcaagccgcatagccgcagaatatgcgggatcaccagaccgataaagccaatcgcccccgccagcgccacgctaacgccgaccatccagccggtcgccaccaccagtaatttgcgccacagccacagcggcagcccaagctgacgagcggagacttcgcccagcgccagtaaattcaggggttgcgactgcagacagacccagcagagcaccggcaggagggctatcatcagccacagctgttgccagtcgacgccgccaaacccgcccatcatccagtacattagctgacgcaggtcaaaagaggtggagaagtagactgcccaggtcatcagggcgctgcagatgatccccagcgccacccccgccagcagcagacggctggtagacagatggcggcgggcgaaacgcagcagaataaaagtgatcagcagcgcgccaaagatggcacacaggccgagcgcccagccgggcaagactcctttgcccagcaggacggcggcaatcagcccgacgcccgcgccgttggagacccccagcagccccggctccgccagcggattttcaaacaacgcctgcataatcgccccggagagcgccagcgccgcccccaccagcagcaccgccagggttcgcggcaggcggatctgccagataaacagctgacctttggcgctgagccactcgccgggcgggatccattgctcccccgcgcacaggctgatcagcagggtgaccagcagcaacagcgttaatccgaagagccaacgccggctgcggcgctgttgaagatgggcgagagtcagcatagattccattacgcagtgggaacaagaggctgattttacggtggctgtcgcggtgagaaaaggaaaacctcacgaccaaacgtcgacgcggaggaggctcccccgcgtcgaccatcccgctttacaccagaatctgaaacagcagcgcaaagagaatgatgttcgccaccacgattgcccagccgttatagagcatatatttcagatgagtagactgcgccagccccatctggccgaacatatctgatgagggaaacggcccgaaccagtccacctgggatgaggccagcagcacggcggtggtcccctggggcggcacgccggcggccatcagcatcgggccaaagattttatgagtaaaggtcatctgggccaccgccgcaccgggcacatggccgataatattgaacgcgaagatgctaaagcacagccaggccggggagatcccctccagcagcggttgggtatactccagcagcccctgataggcgtgcaggccatccatcagctcaaggatcgggttgtacagccagtagagaataaacatccacaccagacggccgcagccgtgatacagggcctgaaggatctgcgtcggtcgcaggccgcctaccaggccggtcatcagggccaccagcaacatcacgattatcgcgaagctgaagccggctttaatcaccacgccaacgatcgccatcacgatgatggtcgccgcgaaggccagcgcgcttaatttacgccgacgctgctgcgcggcgctgagatcctcttgcggcttttccgcgagatcgacgtcatagcgcagtttgccttcggtcatcttctggatccgtcccgccattacccagccggccagcagcgtgaccgcgctcatcggcagaccaacgtacagcagatagtccggatagctcaacccaccgaggctgaggatcgtcacggtgctgggggtgaaaggcccggtaaacagcccaacggaaccggcggtcatcatcagcgcggcgaccgttggcggcgtcaagcgtaccgctgccgccaccggaatgattactgccacgataatggcattgccaccggccatagtgcccagcgaaccgcaaattaaaatcgatgacgccacaatgccgaatttcacccgcgtctgactcgacaacccgatgcgatggacgacaaattttaccagctcaaccgctgcgccggtgcgggtggccacttcccccacgccggcgccgagcataatgataagcccaacggtggcaataaatgacccggtggatttcgccagcatcgtgcccatttccggcaggccggtcgaggtcattatcatggcgataataatcgaggagatgaccgccagcacaatatcaacgccgatcagcgataatatcgctagcgccaccagcggcgtaaatcccagcaggccaagctcactgcctggtcgaccgtggcaccacagcgcgatcaacacgaacagcagcaataacagaccaataataacgtttttccgcgtgatatttcgtctgacaggcgcattgcctgtgagcgttgagtcactcataacactccttaatgccaatcaatccgaccatgatggtcagatggtgtatgggggcctgctcagaaaatatcctccctctttttcattattgattggccgcggcctgagggtttgtttgggtacaaaggaaacgattctgagagcgtaatatgccgccattgggcggggtctacagcacaagatgtaaccaatgcgctgattggtgattaaatctatgttaacttagtgttagtagaaaatgactttttatcggtaggctataaccctgagttaactgttcatgaaactgcgtcatctggaaatcttctatgccgtcatgacctgcggctctttatcgcgggcggcggaagcgctcaatatctcccagcccgcggccagcaaagcgttaaaaagcgccgaaatgaagctgggttttaccctgtttcagcgggtgcgcggcaagctactgccgaccagcgaggcgatcacacttttcgaaaaagcgcagagcatttatcaggacctggacaacctgcgcctgctggccgacaacctggctcgcgatccgcgcgccaagatcactttaggctgtctgccaagcctggggttaagcctggtgccggagctggtgaccgacttttatcagcaaaacagcaacctggtgatgacgctcactaccgagcacaccgagacgctggtcaaaaaactggatttgcgcgagatagatttggcgctgacgctacagccggtgcagcagggggagatcctgaccaccctgattgccgaagtaccgctggtgtacatcgaccgtcattatcgtcagggggcggtggagatcgatcagatcgaccagcagcgctggatctcgccgggaccgcactcgctctctgccgccatcgccacccgtcgcgacttttccaccacccggctaaacgtccagacctactatatggccaccgagttcgtgaagcgcggcatgggctgcagcatcactgatatcttctccgcccagcacaatctggccccggagatgatccatcccattacgccgccgatggcgattaacctctgtctgttacgccgggccgacgtttccctgagcccgatggcgcaaaagttcgtcgattttctctgccagcgtctgcgccagcagctcaaggagattaacctgcggttataccctgaccataaaaagtcaattgcgccgctggggtaaatgctttgacataacccgataaatttatcagcggtggatatatcgggttatgaacaaacgcattgtcattatcggcggcggcgtggtcggtctggccacggcatgggaactgatcaagcgcggccatcaggtgcaattactggagcgcaatgccgaaccgggcagcgccaccagttttgccaacggcggacaattaagttaccgctacgtcgccccccttgccgacagcggcgttcccctgcagggaatgaaatggatgggcaaagccgattcgccgctgaatatgcgtctcaggatgtctctccagcagtggcgctggctgctgcagtttctgcgcgcctgtaataaccagaccaataaaatgaatggcgaccatattttacgcctgtcgctgctcagccgtcaggtcatgcaggcgtggcgggatgaggataatcttgccgatttccactggcggcgcagcggaaaattaattatccatcgtcgcgaatatgattttaataaagcagcaaaagggattgatcctcagtatcagcaggcgctgaatgctgaagcctgcctgcagctggagccggcgctcaaacatattagtccttctctgcagggcggaatctattcgccaggcgatgaaacggcagattgtcatcagttctgccttgccctgctcgacaagctcaatgccagcagcgactttagcctgctgacccagtgtgaggtgcggcgactccataagcgcgggggacgcatcagcagcctggagaccagtcaggggaccctcaccggcgatgagtatgtcgtcgccgccggtaacggcagtggttctctgcttgggcatctgggggttcgcgtgccgctgtgcgccctgaaggggtacagcctgaccctgccctatcctgaaaaagcaggtattgcccctgacatcagcgtcaccgactacgggcacaaaatcgtttatgcccgccttggccaacagctgcgtatcgcggcgatggtggacatcggctacgacggcgacgaactgcgcgaaagccgcattcaggcgctgaaaaacatcgtcgcccgcagctttcctgaactggaggggctggacgaggccgaagtctggaccggcatgcgcccgtcaacgccagccggcccgccgatgctggggcgcgccggctaccccaacctgtggatgaacctcggccagggtagcctcggctttactctcgccgccggcagcgcggtggtgctgggcgcgttaatcgacaatcagatgccagacatttctttagaaggtctcacatggaaacaaaccgcatgacaattattcgtaataatccacaacctcgtcttgccgccagcgttgcgtatggcgatctgctgttcctctccgggcagacgccaaaaagcaatgaagacgatatcgttttacaaacccgtgaagtactggagaagatcgacgcgctgctggccgcagccgggagcgataagcagcacattctctccgcgcagatctggttgaaaaatatcgagcgtgactttgccgcattcaatgaggtgtgggtgcaatggatgccggaaggctatagcccggcgcgagcggccgtgcaggcggagatggcgcgaccagaaatcctggtggagatcatgctcaccgccgtcaaagcgtaaagattgacagaaaagaaaaaggccgcaatgcggcctttttaattagttcagattatttgtctttcggcgacgcgttttcgacacggcttttcagcttctgaccgggtctgaaggtcaccacgcgccgggctgtaatgggaatatcctcccccgtcttcgggttacgtcccgggcgttggtttttatcccgcaaatcgaagttgccgaacccggagagtttgacctgttctccgttttccagagcacgacggatctcttcgaaaaacaactcgaccagttctttggcatcccgcttgctaagcccaagcttatcaaacagatattctgacatttcagcttttgtaagcgccataggttcaatccctcaatgatgcctggaatcgctcttttaatgcctctacacatctggcaacggtagcggcaatctcctcttcttcgagtgtacggctggtatcctgcaggatcaggctaatcgcaaggctcttatacccttccgccacacccttaccacggtacacgtcaaataagtttacgccaactacctgatttacgccaactttcttacattcggctaaaacatcggcggcagccacgttttccgcgaccagcaccgcgatgtcgcgacggttcgccgggaagcgggaaatatcgcgcgcctgaggcaccacgcggtctgcgagcttgttccactccagttcgaacaccagagtgcgaccgttcagatccagtttacgttccagctcaggatgaacaaccccaatgaaaccaatgcgttcacctttaagataaatcgctgcggattgtcccggatgcagcgcggtggtcgcttcagcacggaattcgatatccgctaattttccggttaaatccagaacggcttccagatcgcctttcagatcatagaaatcgaccgtctctttcgccagtgtccagtgctcttcgtagcggttgccgcagatcgccccggccagcatcacatcctgacgaatgcccagcggcgcattggtgtccggcacaaagcgcaggccgctctcaaagatgcgcacccggctctgctgacggttctggttgtagaccacggtgcccagcaggccggtccacagcgacaggcgcatcgccgacatttcgctggagatcgggcttggcaggatcagcgcctcttccccggcgtggatcagctgctggactttcgggtcgacgaagctgtaggtgagcacttcctgatagcctttgtcgttcagcagcgttttcacgcgcttcagcgacaggtccgcttcgcggtgggttcccatgatcagacccgcctgcaccggctcgtcaggaatgttgttgtagccgtaaacgcgagccacttcttcaaccagatcttcttcgatctccatgtcgaaacgccagctcggcgcaaccgcctgccattcgccctcgccaaccgtcacttcgcagccgaggcgctgcagaatgtcggtgacctgcgcgtcagcgatatggtggccaatcaggcgatccagcttgctgcgacgcagcgtaatggtggcgcgtgttggtagattctctttgctggtaacgtcaatgaccgggccggcttcaccgccgcagaggtcgatcagcagacgggttgcacgctccagcgctttatactgcagggccggatcgacgccgcgttcatagcggtgagaggcatcggtgtgcaggccatgacggcgcgcgcggccggtaatggacagcgggctgaagaacgcgcattccagcagcacgttctgggtttcgtcgttaacgccggagtgttccccgccgaagatcccccccatcgccagcgctttgttatggtctgcaatgaccagcgtatcgctgtcgagctttgcttcagagccatcgagcaggaccagggtttccccttctttcgccatgcgcaccacgatcccgccttcaatacggtcgcggtcaaaggcgtgcatcggctggcccagctcaagcagcacatagttggtcacgtcaaccaccgcgtcgatggagcggatcccgcagcggcgcagcttctctttcatccacagcggcgtcggcgctttgacgttgatacctttcaccacgcgccccagatagcgcgggcaagcctgcggcgcgtcaacctgaatcggcagcacgtcgtcaatcgtcgcggcaaccggcgtgatttccggcgcgttcagcggcgctttgttcaggacagcgacatcgcgcgccacgccaatgatgcccaggcagtcggcgcggtttggcgtgacgctgatttcgatggtgttatcgtcaagcttgaggtattcgcgaatatcggtgccgatgggcgcatctgccggcagctcgatgataccgctatggtcgtcggaaatacccagctcggagaaggagcacagcatcccctcagacggctcgccgcgcagcttcgcggccttgattttgaaatcgcccggcagcacggcgccgatggtggctaccgcgacctttagcccctgacggcagtttggcgcgccgcagacgatgtccagcaggcgttcgccgccgacgttgactttggtgacgcgcagtttgtcggcgttcgggtgctgaccgcactccaccacttccccgactacgacgccgttgaagctgccggcgaccggctcaacgccatctacttcgaggcccgccatggtgatctgatcggaaagcgcttcgctgtcgatcgccgggttaacccattcgcgtaaccacagttcactgaatttcattgttctgtcctgcccttatttaaactgtttgaggaaacgcagatcgttttcgaagaacgcgcgcagatcggtgacgccatagcgcagcatggtcagacgctccatgcccatgccgaaggcgaagccggagtagacttccggatcgatacccacgttacgcagcacgttcgggtgcaccatcccgcagcccagcacttccagccatttgccgtttttacccatcacgtcaacttccgcagacggttcggtgaacgggaagtaggacggacggaagcggacctgcagatcttcttcaaagaagttgttcaggaagtcgtgcagcgtccctttcaggttggtgaagctgatatttttatcaacgatcagaccttccatctgatggaacatcggggtgtgggtctgatcgtagtcgttacgatagacgcggcccggcgcgataatacggataggcggctgctggttttccatggtgcggatctgcacgccggaggtctgcgtacgcagcaggcgagtggcatcgaaccagaaagtgtcgtggtcagcgcgcgccggatggtgacccggaatattcagcgcatcgaagttgtggtaatcgtcttcgatttccgggcccgtcgccacggtaaagccgagctcaccgaagaaactttcaatacggtcgatggtgcgagtaaccggatgcaggccgccgttttcaatgcggcgacccggcagcgagacgtcaatggtctctgcggccagacgcgcattcagcgctgcgccttccagttcagctttacgcgcgttcagcgcctgctgcacctgctctttcgcctcgttgatgaccgcaccggctgccggacgctcttccggcggcagctcacgcagggtggtcatttgcagggtcagatgcccttttttacccaggtattccacgcggacgttgtccagcgcagcaacatctgatgcctcgttaatggctgccttggcactggcaaccagctctgcgagatgtgacatggttttcctcattatgtcggtgcagacaccggttatagtgaaattaatattccgaatccatatacgaaaaaagcctccacaggggaggctttctggcgctgttttccgtttcttctttcacgcgcaagccccctgagttcaggtgctaaagtaaaaaaagaagcggaaaatagcagcattcatgcttgcattaccttgtctggtaagaaacgtcagagctgtattgaaaagcctgcgccgataaaagtcaatgtattgatggtgttgaaacgaaaagagggagacaagctccctctttcaactggcttatgccagagctgctttcgctttttcgaccagagcggtgaacgctactttgtcgaatacagcgatgtcagccaggatcttacggtcgatttcaacagaggcttttttcaggccattgatgaatttgctgtaagaaataccgttctgacgtgctgctgcgttgatacgtgcaatccacagttgacggaactgacgtttacgttgacgacggtcacggtaagcgtactgaccagctttgataacagcctggaaggcaacgcggtatacgcgagaacgcgcaccgtagtagcctttagcttgtttcaaaattttcttgtgacgtgcacgtgcaattacaccacgttttacgcgagccatgtgtgctctcctgtatctattctaagttaaaaaagttaaacgttaacgacttatgcgtacggcaggcacgcgataaccaggcccagatcgcctttggaaaccatggctttcggacgcaggtgacgtttacgcttggtagcttttttagtcagaatgtgacgcaggttagcgtgcttgtgcttaaaaccacctttaccggtttttttgaagcgcttagcagcaccgcgtacggtcttaatttttggcattttaataacttccacttcgcattgttaataaacgaaacaaaggcgaacaaaaccagtgagccgaagcccaccggaaatgtttcttgatggccttactgtttcttcttaggagcgagcaccatgatcatctggcggccttcgatcttcgttgggaaggattcgactactgccagttcaaccagatcgtctttcacgcggttaagcacttccataccgatctgctggtgggccatctcacgaccgcggaaacgcagcgtgatcttggccttatcgccatcttcgagaaagcgaatcaggctgcggagttttacctgatagtcaccttcatcagtaccagggcggaatttaatttccttaacctggataactttctgcttcttcttctgttccttagaagacttactcttttcataaaggaacttgccgtagtccatgatacgacaaactggcggctcggcgttagggctgatttcaactaaatctactccagcctcttcagccttttcgatagcttctctcagactcacaattcccagctgctcaccttccagacctgttaagcgaacttcctgggcgcgaatctcgccattaatacgattcggacgtgccgtttgaactcgttttccgcctttaataccttattcctccagttgttgaagactgcggctgcgaatctcttgttgcagcttctcgatcacttcatttacgtccatgctgccgaggtctttcccgcgacgggtgcgcacggccactttgccggcttcgacttctttgtcgccacagaccaacatatacgggacacgacgtaaagtgtgctcgcggattttaaagccaatcttctcatttctcaagtctgcttttacacgaatgcccgcattttgtagtttacgcgtcaattcgttaacgtattcagcctgagaatcggtaatattcatgaccactacctgcactggtgcaatccaggttgggaagaagcctgcgaactcttcggtcaggatgccaatgaagcgctccagagaaccgagaatcgcacggtgaatcatgaccggcacctgacgctcgttgttttcgcccacataggaggcgcttaaacgctgcggcagagagaagtccagctgtacggtaccgcactgccatgcacgatcgaggcagtcatacagggtaaattcaattttcgggccgtagaacgccccttcacccagttgatattcaaatgggatgttattttcttccagcgccaccgccagatccgcttccgcgcgatcccaggtctcgtcgctaccgatacgtttttccgggcgagtcgacagtttgacgacgatcttctcgaagccaaaggtgctatacatatcgtagaccatacgaatacaggcgttcacttcatcgcgaacctgatcttcagtacagaagatatgcgcatcatcctgggtaaagccgcgaacgcgcatcagaccatgcagcgcgccagacggttcgttacggtggcagctaccgaattccgccatacgcagcggcaggtcgcggtaggatttcagcccctggttgaagatctgcacgtgacccgggcagttcatcggcttgatacagtattcacggttctcagaagaggtggtgaacatcgcatctttgtagttgtcccagtggccggttttttcccacagcacacggtccatcatgaacggaccttttacttcctgatactggtactctttcagtttagaacgaacaaacgtttccagttcacggaagatggtccagccgtcattgtgccagaacaccatccccggcgcctcttcctgcatgtgatacaggtcgagctgcttaccgattttacggtggtcacgcttggcggcttcttccagacgctgcaggtaggcattcagcgcttttttatctgcccacgcggtgccgtagatacgctgcaacattttattgttgctgtcgccgcgccagtaggctccggcggttttcatcagcttaaagtgatggcagaagcgcatgttcggtacgtgcggaccgcggcacatatcgatatattcttcatgatgatacaggccaggcttgtcatcatgggcaatgttttcatcaagaatagaaactttatagctttcgccgcgtttcacgaaggtttcacgcgcttcatgccagctcactttcttcttgataacgtcgtagtttttctcggcgagctcatgcatacgtttttcgagcgcgtcgatatcttcctgggtcagggtgtggtcgaggtctacgtcatagtagaaaccattatcgacaaccggaccgatagccattttggtgttgggccacagctgtttgatggcatggcctaacaggtgcgcgcaggagtgacgaatgatctccagcccttcttcatctttcgcggtgatgatagagagagtggaatcggattcgatcgggtcacaggcgtctaccagttcaccgtttacccgcccggcaatggtggctttcgccaggcctggaccgatatccagcgcgacatccatcggactaactgcgtggtcaaaatggcgttggctgccatcaggaagcgtaattacaggcattttatgtccttatttgcagtggtgccccgcacgaaagagcacatacaaaactatataatcataattatcatcaggttaaggcgcagttcccgcttcactctgcgaaaataggagcacgaccggaacgatcgctcccccctgcagccgcctgctgataacaccggggagtagtttacacatcattggtacgtgattaaagccgcaacagcataaatgatggcggaatgcggagaaaacaagaggtccacggataaaaagcagaatataagcgatgtggcgcggtaatattggccaatggcgccggacgatattattcggatatgataaaagagacgtggagatattgcctgctgaatgtataccgcgggccattaaaccggtaccacttaacccggcttattagaccgctcgcgaaacgatagcctgcaatattaagaccactcgccggcaaccagcgtatgcacattaaaggcgtcgttcatggattttccggtggtaggggcgccgggcgcaatattcgaaccagcctcaacgtcagaggctttggcgatacctacctgggtatgatcctgatgacccgatggcggaacgggcgtggcggctgatgcgccaaaagaaagcacgcacagcgccagggctgcgatggtataacgattgtttttcatgatgttaattctcttattacggaaaacagaccgggcaatgtcgccctccggtcagtggttgttagtatagatccagatcacatatttgtccgtcgaatatttagctatttgtgtcaaatagaatgaatatttgtcaggcgctcgtgaataatggagaaaaaatggagggctatttcctttttacaaaaagtaaaacgaacggccagaaaaaataatatcactaattgctaaaaccaaaacgaacaggccggggaaaacccggcctgaaatattacatcttatacccgagggagagcgaggtccggcgatcggtatgctccggcgcggacgcaggcggctcagagttccaggtcacgttgtaggcgaccttcagggcgaaatgggcgttaatcgccacgtttaacgcgctctctgagttgaccgtggtgtcctcggcgccgaacaccgataccccttgcgaaaatttggcgttatcggtcatctgccaggcccaggtacccgaagcataacccagcggttgggtatcagtatccccgtcggtatattcgtcatagcgaacgccaggaccgaattcaaaccgcagactgtgcaccggcccgttgaggatctgacgaccatagcccgccgtcacaacatcgcgctgttgatagccgttgtagcggtcagttagccagctaccctgaccaaaaacatagttcatatcggtcaggttgtagcggctacgtccgccgactgcatatttttctgaggatcgctcatcattggacgacgtgttgctggcgttgccccacagcgaccaggcggtggtattaccataccaggtcagggtggaatccgccgtcatcgaagagctcttggtgttgccggactgcgccaggtagcctgcgttaaccaccccttcgaacggttttttggcagcggaagggtcatccatgacggtaaatacagaatcatcggccattgcgccaacagacgcaaaaagcccccccgccagcataaccgctgcgggtactgtctttaaaagcttcattataactctctaaaatacatttttttaggacagtacaaatgatgaacaggcataatctcgccggctcattgaatttagcgtccgtacaacataaaagagacctgagggtcccggaaactttcgcgaggatcgcggagtgcaggtcctaagaaaggtagcaaattataaaaaagcacgaataacatagcaatcacttactctttcgttttttgaataagacagctccggaaacaatctttatttcataatgaaaatagaggcatctttgcaaaactgtcaggaactggactttccctcccgagtcatcgtgccatgcttaaaataacgacagtcgccgtattaaggaggagaaggaatgaccaaaatttacacgctcacgctggccccctcgctggatagcgccacgcaaaccccacagatctacccggaaggcaaacttcgctgcagcgcgccggtatttgaacctggcggcggcgggatcaacgtggcccgcgccgtgacctttctcggcggcaaagccaccgccatttttccagtcggtggcgctaccggcgagcatcttgccgccctgctggccgatgagcaggtgccggttgagaccgtcgaaacccgcgactggacgcggcaaaacctgcacgtccacgtggccgccagcggcgaacagtatcgcttcgttatgcccggcgcggcactggcggacgatgaattccgccgtctggaagagaaggttctgactatcgaacccggctctctgctggtggtcagcggcagcctgccgccaggtattagcgtcgataatctgatgcagctggtgaaaaatgcgcaacagcagggactgcgctgcatcattgacagttccggcgatgcgctggccgccgcgctggacgtcggcaatattgagctggtaaaaccgaaccagaaagagcttagcgccctcgtgcagcgcgatctcagccaacccgatgacgtgcgccttgccgctcagtcgttgatccagtccggtaaagtgcgccgggtggtggtctccctgggtccgcagggggcattaggcgtggacgccagcggcagcgttcaggtagtgccgccaccgatgaaaagccagagcaccgtcggcgctggcgacagcatggtgggcgccatgaccttgcgtctggcggaaaacgccagccttgaagacatggtacgctttggcgtcgccgccggtagcgccgcgaccatcaaccagggcacccgcctctgctcgcgggccaatacgcaaaaaatctatgattatctctgcgggcgttgatcttccctgcccctccgcgccggcggaggggaatcacaatataagcaggatggtctatgctggaaaggccatcataacaacggggtgtagagatgagcaatgagattaccgcctgggtcgtcagcgtgaccttccatgaacaggcgctgacggagatcaatgaggtcagcaaccattttacccgtgccgggtttgtactgacgctcaatgatgaagagggcacgccccatgagctgggtaccaacaccttcggcctgctgagcggccagacggccgaggaagttaaggccctcagcgctggcctggcggaagcggcccttggccgcccggcggaaatcgctgtggccacattcgccgagtggttaaaagctcaataagtgcgtttagcgcaacggaaagcgtcagttgtgcgtcagttccaggtttacccggtagtaatgcgctaaccttatgatatggtggaaaacatggggagagacagcatgtggcaagcaatcagtactcttttacgcgattggcataccgaagacgctgaaatcgaactgaaaaccgagctgcccggtggagagatccattccgcctggcatttacgcttcggcgggaaagattacttcgtgaaatgcgacgaacgggaacttctgcctatcttcaccgccgagtccgatcagctggagctgctgtcgcgaagcaaaaccgttcgcgtaccgcaggtctttgccgtcggcagcgatcgcgactatagcttcgtggtcatggagtacctccctccccgtccgctggatgcgcacaatgcgtttctgcttggccagcagctagcccacctccatcagtggagcgatcagccgcagttcggtctggattttgataacgatctttccaccacgccgcagcccaacgcctggcagcgtcgctggtcggttttttttgccgagcagcgtatcggctggcagctggagctcgcggcggagaagggattgcactttggcgatatcgataccttagtcgatatggtacagcagcgactggccaaccatcagccgcagccttcgctgctgcacggggatctgtggtccggcaactgcgccttagggccggatggcccctatatattcgatcccgcctgctactggggcgaccgcgagtgcgatttagccatgctgccgatgcatccggaacagcccccgcaaatctatgacggctatcagtccgtttcgcctctgccgtcgggttttctcgatcgtcagccgatttatcagctttatactctgctgaacagagcgattttgtttggcggccagcacctggtaacggcccagcaggcgctggatgatgtattgatggagaaaatgcgttaaacaagcttcacggcggaccttgccggtccgccgcagcgttttatcagttaatctcgacgccgttcaggcggaatttgatggtcatcgttacgccggtacccggtcttccctgctcataacgccatctgcgcatcgcgcttttcacctcgcgttcgaacatattcgccggctgagcagagaggatctgcagattatcaatgcggccatcaggcgaaacgtcaaacttcacccgtaccgtcccttcaatgcgcagcgcctgagcgcgcgccggataggacggctgaacgcggctgatcgcccgcgggccgctcggagcagtaacggtgggtttagccgctgctgtcgaggtgcttggcgctgtacgcgccggcgccgtattgttgttttcaaacggcgaggccggacgcggctctgctgccggcttcacttcccgcttcggctgttcaacctttttctccggcttaggcttaggcttgggtttaggtttgggcttcggcttaggttccggtttatggatcaccaccggcgcctctttcggcggttcaggcactacctctggctccggctcaggttcgggttcaacaacgggctccacgacaggctgcgccgccggaggcggctcaagatcggccggcgccaccattgtgatctctatcggctgcgtcggagaaggctgttcaataacctgatgtaccgaggtataaagcagccccgccacaacggcaccgtggatagccacggacagcagcgttggccacggaaagcggcgaggtaaatcaagggtcattgcgctcatagtcgtttctgttgaaaaatgatgctccgattttaaatgcaaatagcaatcatattcaataaggcgtcttaacctgagtcaatttttgccgccatttgcagaaaaaagctgcgtcggcagtgctttccactccagagcgcatctttgcattgcagtccatcgctgtttaacttaacgtaattcgcctgattattgataaggagctttgccgtgctttacgttatctacgctgaagatatcgccgattctctggaaaagcggctgtcggttcgccccgcgcatctcgcgcgtttacaactcttacacgatgaaggccgactgcttaccgccgggccaatgccggccgttgacagtaacgaaccgggcgcagcaggattcagcggctcaacggtgattgccgagtttgaatcgctggaagcggcccaggcctgggccaatgacgatccgtatatcgccgccggggtttaccgccaggtctctgttaagccatacaaaaaggttttttgaaaataccctttcctttttctggctaaccacaaaaacacccaggtcatcagaatgaagggcgcattttggtacacgacattgaagtgtcgccctttttaacctcgcgaaagcgttgactgttatccgcctgagaagcctggaagatgagcacgcactttctcctgctaccccatcatcgaccatcgcctcgcttttttcggcaatggaaaatgctgacaaaacatcgacgccgcgcgtgatagtgaattactaataccttgtgtaaggctgttagggaggatcgcgttgttatttagcgcttgcatttaatgtcagcacatcctgatatagccctataaatctacagtgcaatagaatgaaaaaaataactgaaagatagttgcttaacgacagatatgaaagcccgaaaaaaatattattgggcatccactgcggatgccgcggaaccgaacgtagcccatcttgctatattcaggaccgtagccgcttgaaagcacgtggaaataacccccttgtagacaaaggattacctggcaggcataaagggatattaactacgctgccagcgttaagttgctgagcatcatttttaaagcctattaatttcgttgcgtaaacttcacgcagagtgatagtaggggcatcactgcttgattaaaaaatttgaaagggaataacaaatgttttcaataagccctgtatttttttgggctaacatttatgtacctgccgattttgaggattattgtgtgaataccctgaaaaaaaccgcattgctttctgtacttgccttatatattcctgtgtcgcaagccgcggctaaggaatacagtcttgatccacagcatacctcggttgtgatctcctggaaccatttcggcttctcaaaccctaccgcctatatctctgatgtttcagggaaactggcctttgataaagagaatccggagaaatcctcggtgaacgtcacgctgccagtgaaaaccattgacgctcacgtcaaggcgttaacggatgagtttttaggcaaagagtattttgatgttaaaacgtttcccgaagccactttccagagtaccaaagtggaaagcaaaggcgacaataaatatgatgtggaaggtaatttgacccttaaaggcatcaccaaaccggtggtcctgcatgccgtcctgaataagcaggatatgcacccaatggtgaaaaaagaggccattggatttgatgccaccggtgtgataaaacgttcagactttaagcttgataaatatgtgccggcggtaagtgataacgtcaccatcacgttatccacggaagcttatgcaaaataagtaaaagctggcgcaacgattgctttttattcaggatgcttattgcatggcctctctggataatataacaggctcagattattcatggtcaggatcggtcggttcatttagcttcaacgcgctggaccgcttaataacccccttgcctgtctgagtctgttttctcattccctcagctcccgcctggttaccgcagctggccggtcatatcattaagcatttaacagcgccatgcccttcctgagcggcaataaaccctgagcggcaataaatgctatctgacggttaattcctgtcgcgccgcaaacgacttggctctggatcttgtcgtccgtcattacaagccaggcgtagcatctctctttcactgaggcgggagctctgttttgtcgtcgcatcgcagcatgaaaaaccatcattgccctatggagatgtgcaacgggaatttagcgcagagagaaaaacgacaacggcaccgcgtacggtgccgtttgcctgctcgcttagctgtcagggaagataaacagcagggcatgacgctgccgtttcaccagccccttcctgatagcgaggatccgcatattgcggcgcgattgggcttccagccagcgcgctttacggcgattcacctgtctcagcatgcgccagcgccctacttccgttctactacgcttcattgcaacgactctacgagtgaaaacagcccccattataaacctctgccagcaactgactaccgctttcgctgcgtttttatttgccagaaaaatactgatgcgtaaactcatcacatatcgtcattcaaaaggattttacatctatgacaaccttttacacggtggtgaactggctggtcattctggggtactggctgttgatcgccggtgtaacattacgaattctaatgaaacgccgcgctgtcccgtccgccatggcatggttgctgatcatttatatcctgccgctggtggggattatcgcctatctctcctttggcgaactgcatctcggcaagcgtcgggccgagcgcgccagggcgatgtggccctccacggccaaatggctaaacgacctcaaagcctgcaaacatatcttcgcggaagataacagcccggtggccgaatccctgttcaagctgtgtgaacggcgtcagggcattggcggcgtaaaaggcaaccagctacagctgctgacggaatctgacgacgtgatgcaggccctgatccgcgatattcagctggcccgtcacaatatagagatggtcttttatatctggcagcccggcggcatggccgacagcgtcgctgaatcgctgatggccgccgctcgccgcggagttcactgtcggctaatgctcgactccgcgggcagcgtggcctttttccgcagcccatgggcggcgatgatgcgtaacgccggtattgaagtcgtcgaagctcttaaggttaacctgatgcgcgtgttcctgcgccggatggacctgcgtcagcatcgtaaaatggtgatgatcgataactatatcgcctacaccggcagcatgaatatggtcgatccgcgctactttaaacaggactcaggagtcggacagtggattgatctgatggcgcgaatggaaggcccggtggcgacctcgatgggcatcgtctactcctgcgactgggaaatagagactggcaagcgcattctgccgccgcccccggacgtcaatatcatgccgttcgaagaggccagcggacatactattcacacgatcgcctccggaccgggctttccggaagatctgattcatcaggctctcctcaccgccgcctatgcggcgaaagagcatctgatcatgaccaccccctacttcgtacccagcgacgacctgctgcatgcgatctgtaccgccgcccagcgcggcgttgacgtgagcattattttaccgcgcaagaacgattcgctgctggtaggctgggccagccgggccttcttcaccgagctgctggcggccggggtcaaaatctatcagtttgagggcggactgttgcataccaagagcgtgctggtcgatggcgagctaagtctggtggggaccgtcaacctggatatgcgcagcctgtggctcaacttcgagattaccctggtcatcgatgacgccggtttcggcagcgatctggcggcggttcaggatgattatatctcgcgctcgcgcctgctggatgcccgtctctggttaaaacgtccgctgtggcagcggatcgccgagcgactgttttacttcttcagcccgttgctgtaaaacgtgcccatcagataccgaatgagtagcaatcatggatatggatttaaacaaccgcctgaccgaagacgaaacgctcgagcaggcttacgatatcttcctcgaactggcggccgacaatctcgacccggcggacatcattctgtttaacctgcagtttgaggagcgcggcggcgccgaactgttcgacccttcggcagactgggaagagcatgtggattacgatctcaacccggatttcttcgccgaagtggtgattggtctggcggataccgacggcggggaaatcaatgatatcttcgcccgcgttctgctgtgccgcgagaaagatcataagctgtgccatattctgtggcgtgaataacctttaacatccagtaaaaagcctgccgcggttctcccggcaggctttttttacgtcgccagcttacttcggcaaggcatgaccgcaggcatggcagaaacgggcgttatcgtcatggtcgccctgctgacactgcggacacaggcgctgctgtcgtcgacgattcagggcgctggtcatatgcgtggtgataagtccggtcggtatggcaataatggagtagccgatcaggataagaatggaggccaggatgcgacccaacggcgtgtgcggcgtgatgtctccgtagccgacggtggtgatggtcacgatggcccaatagaccgaggcgttaagcgtggtaaagccgtattccggcccctcaatcagatacattaacgagccgaaaatcaccatcacaatggcgataaacgaataaaacaggatcagctgatggcgcgcgctgacaatcgctcgccagaacacgttgagcgaaggcataaagcgcagtagtttgagaatacgcagcgcgcggatcgcccgcattgcccgccaggcgaatacataattgaggctaatttccggccatagccacatcatatacagcggtaaaatcgtcgccaggtcaatcagcccccaaaagctgaaaatatagtggagcggattgggccaggtagcgatacgcagcaggtattccagggtaaagaccgcggtcaccagcagctccagccagacgaaaatatgccattcatctaatgtcaggtgatattgcgtgcccagtcccgactcgataaatatcaccagtacgctgagcagggcgaaaagtccgcacagcccttcaaagcggcggccggaacgtcggttctgatcgaaaagtaaatgataaagccgcagacgagcggcagaaagcatacccacttcgttaacctcgcaaaaaaaagggctgacctgcgtcagcccctgagattataacgggtctaccttaaggcaggaaaccgcatggcggaaactgccttccagcaccgggcgggttttggcgcactccggtccggcaagcggacagcgggtgcggaatacgcagcctgagggcggattaatcggcgagggtaattcgccttccagcagttggatagttttcgttttctcgagatcaggatcggggatcggcaccgccgacatcagcgctttggtatagggatgtagcggattatggtacacctcgtcgtaggtccccagctccaccgcatggcccagatacattaccagaacccgatcggagatatgcttaaccaccgccagatcgtgagcgataaatatcagcgatagccccatctcacgctgcagttgctgcagcaggttgacgacctgcgcctgaatcgacacgtcaagcgcggagaccggctcatcgcagataatcagctttggctcaaggatcagcgcccgcgcgatgccgatacgctgacactgaccgccggagaactcgtgcggatagcggttgatcaggttgggcagcaacccaactttcatcatcatcgctttgacgcgatcgcgcacttcctgacggggcatcttcggatgataggtacgcagcggttcggcgataatttctccgatggtcatgcgcgggttcagcgaggccagcggatcctggaagatcatctggatatcgctgcgcacgtcgcgccactcttcctgcttcatgcccagcagatctttacccagccaggccactttgccatcggtcgctttcaccagaccaataatggcgcgggcgaaggtcgatttgccgcagcccgactcccctaccacaccgagggtttcaccctcgtaaaggcgcagcgtcacgccatccaccgctttcagcgttttcgacggctgccagaaccactgcttgccatctttgatatcgaagtgcaccttcaggtcggcaatttcgagcaggacttttcgttgttcagttacggcgttcatagcagatcccccaccggtttaaagcaggcgcgcaggcggcctggcgcgaacgattccagcggcggcgcgctgctgcactgctccatggcatgcgggcaacgcggctggaatggacagccttttggcaatcgcagcaggttcggtgggttgccgggaatggtcaacaacgcatcgccttccgcatccagacgtggaaccgcattcaacagcccaatagagtatgggtgcgacggttgatagaagacatcgcgcgcctgaccgtactccatggtgcgcccggcgtacatcaccagcactttatcgcagatccctgccaccaccccaaggtcgtgggtgatcatgataatggccgtgttgaattcgcgtttaagctcattcaacagcgtcatgatctgcgcctgcacggtaacgtccagggcagtggtcggttcatccgcaatcagcagccggggccggcacagcagcgccatggcaatcatcacgcgctgacgcatgccccggagaactcgtgcgggaacattttcatgcgcttacgcgcttccggcatttttaccgcgtcgagcatcttcaccgactcttcaaacgcttcggctttactcagccctttatgcagcatcaggacttccattaactgctcgcccacccgcatataggggttaagagaggtcatcggatcctggaaaatcattgagatttgttcagcgcgcagtttgttcagctcacgctcgggcaaattgaggatttgccgaccgttaaaggtggcggaacccccgatgcgaccgttggccgccagcagtcccatcagggcgaaggcggtttgcgatttaccggagccggattcgcccacaatgccgagcgtctcgcccgcctgcagggtgaagttcagatcattgacggcggtgacgtcgccatccggcgttttaaaggtgacgcgaagatctttcacgtccagcagtagcccgctgtggctctgcgcttgcggcgcttttgccgtttcaatcatggtcatggcagcgctccttagcggtctttcgggtcgagggcatcacgcagaccatcgccgataaagttgaaacagaacagggtcaccaccaggaaacccgccgggaacaacagtagccagggcgaaacttccattgagttggcgccatcgctgagcaatgcccccagctgctgagcggctcctgcgtccccagtcccaggaaactgaggaaggattcgaagaggatcatgctggggaccagcagcgaggcatacaccaccaccacccccagcacgttggggacgatatggcgcagcacgatgctcgccgtcgagaccccgccgacctgcgcggcttcgataaactctttgcgcttcaggcttagcgtctgcccgcgcacgatacgcgccatatccagccaggacaccatgccgatggcgacaaagatcagcaggatattctgaccaaaaaaggtcaccagcaggatgacgaagaacataaacgggaaggagttgaggatctccagcagacgcatcatcaccgaatccactttgccgccgagataaccggagagcgaaccgtacagcgtgccgaggatcaccgccaccagcgccgccgccaccccgaccatcagcgaaatgcgcccgccgatcgctacgcgcaccagcagatcgcgcccggaggagtcggttccgaagtagtggccggaggccatatccggggcattggacatcatgccccagtcggtatcgaagtaggagaacgacgacaccatcggcgcgaaggtaacgaacagcgcaataagcaccagcataatcaggctggtcaccgcggcgcggttatgcataaagcgacgacgcgcatcctgccagaggctacgcccctccacttccagcttctcactgaagttttccagcgcctcgctatttttcttacttaacatcatggcgaactccggcttcagtagcgaatcttcggatcgataacggcgtacagcacgtcaacgatggcgttgaacaggatagtcagggcgccaacgaggatcgtcaggctgagcaccagcgagtagtcgcggttaagcgccccgttaacgaacagctggccgatccccggcaggccgtaaatggtttcaatgaccattgagccggtgatgatgcccacgaaagctggccccatataggagagcaccggcagcagcgccggcttcagcgcatggcgcagaataatgcgacgcatcggcagccccttcgcccgcgcggtgcggataaagttagagtgcagcacttcaatcatcgaaccgcgggtgatacgcgcgatgctggcgatataggccagggaaagcgccaccatcggcaggatcataaatttcagcgccccgccgttccagccgccgcccggcagccagtgcagggtaatggcaaagatcatcaccagcagcggcgcgaccacaaagctcggaataaccacgccggtcatggctacccccatcaccgcgtagtcccagcgggtattttgcttcagggcggctatcaccccggcggcaacgccgatcaccaccgccagtaaaaaggcggcgaagcccagtttcgctgaaaccgggaagctggcggccaccagatcgttgacggaataatctttgtatttaaaagagggaccaaaatcgccatgcgccagctgcttcagataattgaagtactgcgtcatgatagggtcgtttaaatggtattttgcttcaatattcgccatgacttccggcggtagcgtgcgttccccggtaaaaggacttcccggcgccagacgcatcatgaagaatgagatggtgataagaataaatagcgtcggaatcgcttccagacagcgacgtaagataaattttaacattgcccgtaccttctggcgtgtgcctttgcactgctctcaaataagacacgatggagcgagccgagacccgctccacgtattgccattaatgtttgataacgtagaggtctttggtatagacgttatccatcgggtctttaccggtatagccaccgacccacggtttcaccaggcgggcgttaacgtagtaatagaccggtacgatcgcgctgtctttgtccagctgctgctctgctttcgcataggccgccgtgcgctgcgcttcatcggatgcttttacggattcagccataatcttgtcgaacgccgggctcttatagtgcgcggtgttcattgaactgtcagagagcatggtgttcaggaaagaggttggctcgttatagtcggcgcaccagcccgcacgcgccacgtcataggtgccctgatgacgggtatcgaggaacgttttccactcctggttgaccagcttcacgtcaatgcccaggtttttacgccacagcgaggcggcggcaatcgccagcttcttgtgcaaatcagaggtgttatacagcaggttgaaggtcaacggtttatcagcgctatagccggcttcggccagcagtttcttcgcttcttcgttgcgtttttcctgcgaccaggtaaaccattccggctcgctcagcttcgcgccatcggtatacggtggggtgtagccgtaggccggcagatcgccctgtcctttcaccttattagcaataatatcgcgatccagacccagcttcagcgcggtacgcacgcgcacgtcggtgaacggggccttctggttgttgatttcgtaataataggtacacagataggggtcaacgtgcagctcgttggggatctcttttttcagcttctggaagagttcgatcggcagctggttataagtcatgtccagttcaccgctgcggtagcggttaacataggtcacttcggaagaggtcggcagccaggtaacggtgttaatgacggttttagcattatcccaatagtgcgggttacgctccatcacgatccgctcgttgaccacccagtctttcagagtatacgcgccgttggtaacgatattgccaggctgcgtccacttttcgccaaatttttcgatggccggtttgtagacgggagacatcgccgggttaaccagcagtttataaaaatagggtaccggttcgctgagggtgacttccagcgtgtggtcgtcaatggcttttacgcccagctcactcggcgctttcttgccgtcaatgatttcgtcgacgttaacgatatgaccatattgcggatagctggcataaggagacgcggttttcggatccaccagacgctgccagctgtatacgaagtcctgggcggtaaccggctcgccgttagaccattttgcatctttacgcagatggaaggtccagactttaaaatctttattatcccagctctccgccacgccagggatcgggtggccatctttcggcgaagtattcagcaaaccttcgaacaggtcgcggctaatattggcctctggcaccccttcgattttatttgggtccagcgattgcggctcggcgccgctattacgtaccagggtttgcttctctgccagctgcacaccagccgggacatccgctgccattgccatattgccggcgatcagtgcggatagcactcccgcggcgattaaacgctttttagtgatgatggtcattgtgttgtaactccagtcattataattactggttttttaaccagcctgtttttcccgttttcgggttctgtccaacgcaggagtttgcgattggcagattgctatcaccgacttatttattacgaccgctcgaacggcagtcttaacgtcgattcgttgccctcgctggagggtcgttctggcgaaatgagttaattaaaaataattctcatttgcgtacataattcagcagacgataacggcggaaagtaccaaaaggtaaacacctccgccaatgcaatttgcaaatatgttaccgaattctcttttattgccggttttgccagcgtgacaagcgtttgccataaaacgtcgatgtaaaaatattattatttatcagagcattacgataatttcatcagccgacatactgagcagcgaccgcaagatggttttttgtacaaaaatttaacaatagattactttttagcacattcatctgccgccttgttaaaattactaatatcatttcgatgatccgacagcaagtaccagagaatgatgtgaagaaaataacatcacaggagtgggaggcgtgaggagaatgttaagagaaatatttcatatcttaatgaaaaatatgaaattaatagcgatatcgcaaaatattatccctaccgccagttccgcgctggctaataggttttgctaataatcgcgcaggcgtgaagcgagactccccgcctgctggcgacgaactaactcagcagtcctgggaaaagcgctttaatcccggtcacaataaactcaatgccgagagccatcagcaacaggcccataatacgggtgatgacgttgattcccgtctgccccagcaaacggaccagccacggcgccatacggaaaatcccccagcagcagagggcaaataccgctatcgccagtgagaacccgaccagatgcacccaggagtggtaccgggtcccccagacgatagttgaactgattgcccctggcccggccattaatggtagcgcgagaggaacgacgccgatgctctcccggaccgccgtctccgacttttcctgcttgttctgcttatcttcgccgagcttaccgctgatcatcgacatcgcgatggtcaccaccaggatgccgccggcgatacggaaggagtcaatggagataccgaaaatctgcagaatgccatcgccgaggaacagcgacgtcaggaggatgatcgccaccgacaggttggcggtgaggttggtcttattacgcaccgcagccggctgatagctggtcatactgatgaataccggaataatgccaaccgggttaaccagggcaaataagccgatgaaaaacttgaaatatgcagaaaaatcgaacagtgattgagtcacattgggctccgcagcatcatcaaaattggcggttgactgttaacagcataaaataactgcgcgaaacatacgctttttacctgcaatattcattataaatatgcataacccggtgatatgtatcgaatgttagccatttgtatatttaatgctaatcgtttttttaatttcaaaaccctcccatcacacttgatcgaaccggtcaaaaagcagccagctgaaaggtatcagcagcgacaatacttgatctaaatcacgtaatttgtactcagaagtgagtaatcttgatgacaccaacagagtggaaggcagcagtacctgaaagcgaaagagataaagcttttttagtaaatcggtgaaacagcgccctgatttttctacataaacatttacatgcaagctgttaacggcctgtctataatgtcgaatcgagcgactgatttactaaaaaagtttaacattatcaggagagcattatggctgttactaatatcgctgaactgaacgcgcttgttgagcgtgtcaagaaagcccagcgtgaatatgccagtttcactcaagaacaagtcgacaaaatcttccgcgccgccgctctggccgctgcagatgctcgaatccctctcgccaaaatggccgtagccgaatccggcatgggcatcgttgaagacaaagtgatcaaaaaccacttcgcttccgaatacatttacaacgcttataaagacgaaaaaacctgtggcgttctgtcagaagacgacacctttggcaccatcactatcgctgagcctatcggcatcatctgcggtatcgtaccgaccactaacccgacttcaacagccattttcaaatcgctcatcagtctgaaaacgcgtaacgccatcattttctctccgcacccgcgtgcaaaagaagccaccaacaaagcggctgatatcgtgctgcaggctgccatcgcggccggcgcgccgaaggacctgattggctggatcgatcagccgtctgtagaactgtctaacgcgctgatgcatcacccggacatcaacctgatcctggcgaccggtggtccaggcatggtgaaagcagcatacagctccggtaaacctgctatcggcgtcggcgccggtaacaccccggtagtcattgatgaaaccgccgacatcaaacgtgccgtagcgtccgtactgatgtctaaaaccttcgataacggcgtgatctgtgcttctgagcagtccgttgtggtggttgattcagtctatgacgcggttcgcgaacgtttcgccagccacggcggctacctgctgcagggtaaagagctgaaagccgttcaggacattatcctgaaaaatggcgcgctgaacgcggctatcgttggtcagccagcggccaaaatcgctgaactggcaggcttcaccgtgccggccaccaccaaaattctgattggtgaagtgaccaacgttgacgagagcgagccgtttgctcacgaaaaactgtctccgacgctggctatgtaccgtgcaaaagatttcgaagacgcggtagccaaagcagaaaaactggtcgccatgggcggtatcggtcacacctcttgcctgtacaccgaccaggacaaccagccggctcgcgtggcttacttcggccaaatgatgaaaaccgcgcgtatcctgatcaacaccccggcttctcagggtggtatcggtgacctgtacaacttcaaactcgcgccttccctgactctgggttgtggttcctggggtggtaactccatctctgaaaacgttggtccgaaacacctgatcaacaagaaaaccgttgctaagcgagctgaaaacatgttgtggcacaaacttccgaaatctatctacttccgtcgtggctccctgccaatcgcactggatgaagtgattaccgatggtcacaaacgcgcgctgatcgtgactgaccgcttcctgttcaacaacggctatgccgatcagatcacttccgtactgaaagcagcgggtgttgaaacggaagtcttcttcgaagttgaagctgacccgacgctgaccatcgtacgtaaaggtgccgacctggcgaactcctttaaaccagacgtgatcatcgccctgggcggcggttccccgatggatgcggcgaaaatcatgtgggtcatgtacgaacatccggaaacccacttcgaagaactggcgctgcgctttatggatatccgtaaacgtatctacaagttcccgaaaatgggcgtcaaagccaagatggtggcgatcactaccacttccggtaccggttctgaagttacgccgttcgccgtggtgaccgatgacgcgaccggtcagaaatacccgctggcagactatgcgctgaccccggatatggccattgtcgatgccaacctggtgatggatatgccgaaatcgctgtgtgcgttcggtggtctggatgcggtgactcacgccctggaagcttacgtttccgtactggcttctgagttctctgacggccaggcgctgcaggcgctgaaactgctgaaagagtacctgccggcttcctatcacgaaggttccaagaacccggttgcccgtgagcgcgtacacagtgccgcgactatcgccggtatcgcgttcgctaacgccttcctcggcgtgtgtcactcgatggcgcacaaactgggttcccagttccatattccgcacggtctggccaacgccctgctgatctgcaacgttatccgctataacgcgaatgacaacccgaccaagcagaccgcgttcagccagtacgaccgtccgcaggctcgtcgtcgttacgctgaaatcgccgatcacctgggcctctccgcaccaggcgaccgcaccgcagcgaaaatcgagaaactgctggcatggctggaaagcattaaagctgagctgggtattccgaaatctatccgcgaagctggcgttcaggaagctgacttcctggcccacgttgataaattgtctgaagatgcattcgatgaccagtgcaccggcgctaacccgcgctacccgctgatctccgaactgaaacagatcctgctggatacctactacggccgcgaattcgtcgaaggcgaagccggtgcgaaagccgaagttgctccggtaaaggctgagaaaaaagcgaaaaaatccgcttaaccaacagcgatagcatcgcgacaagccccgtcacctgacggggctttttttatccccgctatcagccattctttatcgccagctacgcaacctatagcagacattaaaaaggcgcccacaggcgcctgtacgagcttctgagggtatcagcagggacggtgctggttttgtaccttggttaacgaaccgacgctcagcgcctctttataatgcttacggcagaccgatacgtaccgctcattaccgccgatgacgacctgctcaccctcattataaggacgcccctcctgatcgaggcgcaataccatgctggccttgcggccgcagaagcagatcgttttcagctcaaccagcttatctgaccaggccagtaaatactggctgccggtaaagagctcaccgcgaaagtccgtccgcaacccatagcaaagcaccggaatatccagcgtatcgacaacttcggacagctcatgaacctgttcacgcgtcagaaactggctttcatccaccagcacgcagtgaatcggctttagctggtgctccgccgcaatatcgtcaaataacgaggtctgtggattatacaatcgggccggcgaggagagcccgatacgcgaactgacttttccggcgccaaagcggtcatcaatctcagcggtataaacgacggtacgcatcccccgctcctggtaattgtacgaagattgcaacagagcggtcgacttacctgcattcattgcagagtagtagaaataaagttgtgccatcggctgcgtgaccccaatcaaagtgttttatcgcggcgacgattgtaccatattttatgcgcacagccgcgctttcagcaggggtattgtcgcgaagctgaagggcctgcaaaccgaaaggattaagaagatgaattgaattttcagggccactatttgtacgccccgttacgctactggcgcgctaaccattgtcttttcgtgcttatagaccggttgcccaggggctataagcagggctgccggttgttttatattaagccttgtaaccaaaaatgcgctaatactgacgagggttatttacccatgtaaaggatcatttctctcactgaacctctcaaaaagcataccgtctcaatgttttagcttgccttcgcctcatcgctataagcgatgaaagatgtgaagcggcacgggaattttaacttaaattaattaattctcgcgacaaataaccagtaattttgaattccttacattcccccctattgcacaacgcattttatcgctctattattagttcaacaaaccaccccacaatataagtttgagattactacaatgagcgaagcacttaaaattttgaacaacatccgtactcttcgtgcgcaggcaagagaatgcaccctggaaacgctcgaagaaatgctggaaaaattagaagtcgtcgttaacgagcgccgtgaagaagaaaacgctgccgcggcagaaattgaagagcgtacgcgtaagctgcagcaataccgtgaaatgctgattgctgacggtattgatccgaatgaactgctgagcaccatggctgccgttaaagccggtaccaaaaccaagcgtgctgcacgtccggctaaatatagctatgttgacgaaaatggtgaaaccaaaacctggaccggtcagggccgtaccccggctgtgatcaaaaaagcaatggatgagcaaggtaaatcactggacgatttcctgatctaatctccgttgatcgctataaaaaatcccgctgcggcgggattttttttgccctcagggccgatataaaaaaaccgggagtcgcagatgcgctcccggtttgtgctttcaaccgcgcggcggattacttcgctaccgccgtttccagccaggctttaaaatcgtcgcccagcgttttgtgacgaataccatattcgacaaacgcctgcatgtagccaagcttattaccgcagtcatggctcttgcctttcatatgataagcttcaaccgtttctttctcgatcagcatatcaatggcgtcagtcagctgaatttcatcaccagcgcccggaggggttttcgccagcagcggccagatatcggcgctgaggacataacgccccaccaccgccaggttggacggcgcaacgtcagcttttggcttctcaaccacgcccaccatcggtacgctttcgcccggcttcagggattcgcctttgcagtcaaccacgccataagcggttacgtcttcgacaggttcaaccataatctggctggcgccagtctcatcgaagcgagagatcatctcagcgaggttatcgcggctcagatcggattcatattcatccagaataacgtctggcagaataaccgcgaccggctcatctcccactaccggatgggcgcacagcaccgcgtgacctagacctttcgccaggccctgacgaacttgcataatagtcacgtgcggcgggcaaatagactgcacttcttccagcagctggcgttttacacgtttttccagcatcgcttccagctcaaaactggtatcgaaatggttttcgatagagtttttcgacgagtgcgttaccagaacaatttcagtaattcctgcagcgatacattcattaacaacgtactgaattaacggcttatctaccagcggcagcatttcttttggaatcgctttggtggccggcagcatcctggtgcctaatcccgcaaccgggataaccgcttttctgactttagaattaagggcagccattgaaatctcctggactgtttgttttttaaacttctcgttacaaataacgtgtcgagtatatcagtcaaccgcgtatttactggtctgaaaagctgccgatagcctcgaattaggacttttacgcataaaacagctcgatgttaccaccgctaaagggcaagaggtaatcccgtctgcttagatataaacgcaattgctcattccgcagacaacattaagcgtaaacgaccgccagccccccaaatttggcactgccacgaggtgcagcgttggctaatttggttaagataagcatcacccagcgtccccaaaggaacgccattactaatctgaatttgatgctcccctgtattcagcgtgccattaagtcccgctgacaccagaattaaatttttcagcccgctgtggtaataccctactaacagagggaactggcccggaagatttgcctgacgcagcagttgattcacctgttttaacaaacttcccatttctggtagccgttgtccctggtgcgccagttgctcctgcagcagaccattaaacaacgcgcgcagcaataatgctgccaacacgccattatcgcctgcgcgtgtgacatccagacaatagaaagccaaatcattttccgaaagcggcgcgatatcgagtaccagaccgggcttgtctgccgacaccagttgtcgataatgaatacggcagtgcgacatttcctgttgcaccggcggctgtaattcctgcaataatcttgaagcggcgatgggattactgaccagcgcatcccagtcctcaaataaacgctcttcctcttccacgcgcgaactgaacatcgcgggatagagacaggcgtaaacggtctcgcgcaggcgatcgaaatcttttactggctttaacagcacgtcctggacgccaagtcgcaacgctttagctatatccgccatgttttcggtggcggagatcatcaggatcggtaactgttcgccgcggttacgcagcgtttccaccagctccagaccgttcattctcggcatagaaatgtcgcaaatcatcaggtccggatgcacctccgtcattttatgcagggcatccttgccatcttccgcctggaaggttgttgctcccagcgaggtcagccatccatgcaagagtgagcggaaaacgggttcgtcttcaactatcagaatctgttttcccgccaatggctgcgtcatgatatctcccctggctgacgataattcaatagtggcacgctattctcactatcgcctgtcagaatttgcttaagtcagtaactcgtacgtcaaacggctgtacgcactaatggtaataattcatccattttcttttctaccgccagttgccccgcggcaatcgcctctccggcgcgatgaaaatcaagcgtcgaaacttgcggacagtatggctgcaacaggatatccggcgggtcacccgccatacgattgcgtttaagacggttttccagtacctggatagatgtggtcatgatctccatcgccgtcggcgtcacggccgtacggcgggaactcattcgcgtcaagcgcgcgcgcagacgagtatgccatggcccctccttctcttccgcttcctgccgcggcgtttcaagggagaacaaatcctgctgcataagatgggcatcatgttgcaggtcgacggcaatcacaatatccgctcccattgcccgggtgagcgacacaggaaccggattgaccaccgcgccatcgaccagccagtaaccattatgccttactggcgacattaaccccggcatactgcaggaggcgcgaatggctaaatgtagatcgccttcggtaaaccacagctccctaccggtgcttaaattggtggcaacagcggcaaaccggcgctcgcagcgttcaatctcggtgacgggcataatgcggcggtaatgattgaataccttttccccccgcagcagtcccccccggcgccaggagagatccatcagcttcaggacatcccagttgctgaatgagcagacccatgattcgagtgccgggagtcggttacaagcatacgccgcccctaccagcgaaccgatagaacaaccggctacgatatcaatctcaataccggcccgctggagggcgttgatgacgccaatgtgcgaccatccgcgagcggctcccgcacctagcgccagaccaattttaagctttctcattagtactaataactatccttccactctgagcgtggcaacattgtcacggctcagttaacataatgccctttggcgtagaagcgccgttactctttcttccatggaggcagttttgtcgcaattatgcccctgtggcagcgcactggagtatagctcatgttgccagcgatatctgtccggcgctgagcttgcgccgggcccgtcacagcttatgcgctcccgttatagcgcgttcgtcatgaaagacgctgactatctaatcaaaacctggcacccgtcctgtcaggcgcagcaatttcgcgccgaactggagaaagggttttcccagaccgaatggctgggcttaaccctgttcgccagtgatgaggggcgagctccaaatgaaggttttgtcagctttgtcgcccgctttaatgacaataaccgccctggcgccattattgaacgttccagattcttaaaagaaaatggacagtggtactatatcgacgggacacgaccgctgattggccgtaacgacccctgcccctgcggctcaggtaaaaaatttaaaaaatgctgcggccagtaacgctggcacagcgcttgcaaacattacaggattttcctcgcgatgcattcattacaacgtaaagtactacgcactatttgccctgatcagaaaggcctcatcgcgcgtatcaccaatatctgctacaagcatgaactcaacattgtgcagaacaatgagtttgttgaccaccgtaccggtcgtttctttatgcgcaccgaactggaaggcatttttaacgacgctactctgctggccgatctcgacagcgccctgcctgaaggctccatccgcgagctgaatccggcaggccgtcgccgggtggtgattctggtgacgaaagaggcgcattgtctgggcgatctgctgatgaaagccaactacggcgggctggatgtcgatattgccgcggttatcggcaaccatgacaccctgcgctcgttggtggagcgctttggtattccgtttgagctggtcagccatgaaggactgagccgcgaagaacacgatcagcggatgggcgatgctatcgccgcccacgaaccggattacgtggtgctggccaagtatatgcgcgtcctgacgccagaatttgtcgcccgcttcccgaacaaaatcatcaatatccaccattcgtttttgccggcgtttatcggcgcccgtccctatcatcaggcctatgagcgcggcgtgaaaatcattggcgctaccgcccactacgtgaatgacaatctggatgaaggcccgatcatcatgcaggacgtgattcacgtcgatcatacttataccgcagaagatatgatgcgcgctgggcgtgatgtcgaaaaaaacgtcttgagccgagcgctgtatcaggtactggcgcagcgcgtcttcgtttacggtaaccggacgattattctttaatcgactgagaaatgaattggttagctttacggcgttacgtgtaaaaatcaggcaaccagtttatttttgtcaaacgaatgctttacaggggcgcatcatttggtatgatgcgccccgcttcccgagaaggaagcaggccagtaccaagcattaccccgtggtggggttcccgagcggccaaagggagcagactgtaaatctgccgtcatcgacttcgaaggttcgaatccttcccccaccaccattattcactacagtgatatggtttccccgacaagcgtaaacgatgtttgcacttagcgggaagggtaagaaccttcgactaaggttcgactcgagcgccagcgagagaacgttgccgcaggcaacggcccgaagggcgaggaaagatagcgacgagttatccttcccccaccaccattcattttgctgaatagcctacaatgtgattttacccctggtggggttcccgagcggccaaagggagcagactgtaaatctgccgtcatcgacttcgaaggttcgaatccttcccccaccaccatctccccatgtcatgcccagcataatctacctacggtattctatattctgccctacagggaaggatgagaagcttcgactaaggttcgactcgagcgaagcgagagaacgttgccgcaggcaacggcccgaagggcgaggcgctttagcgccgagtaatccttccccaccatcatctcttcatgtattgcccagcttattccacctgcgatacgctatattctgccccacggggaaggatgagaagcttcgactaaggttcgacttgagcgaagcgagagaacgttgccgcaggcaacggcccgaaggcgaggcgctttagcgccgagtaatccttcccccaccactgttgcactctcagccaccggtcctgctgtctcatcgctcgcgcttcgcttagcgaggctacacattcctgcactctcagccacctgttctgctgtctcatcgctcgcgcttcgcttagcgaggctacaagtggtgccgtctggtagcccggacaggtgcgcagcaccgcctccggaaaaactcacagcggtggcaaccgcctttttaccggcgagcttttcaccaccgaggtgttacactgcgcatactccgccagaccgtccagcagggtatccagctgggcaatatcgcgcaccacgagacgcattacaaaacaatcttccccggtcaccttgtcactttcaatacattccggcatcgcctggatatatttatccaccttctgcagcagcccaggcagcggccggacccgcaccagcgcctgcaggctatagcccagcgcggcgagatttacccgcgccccatagccctgaatgacaccccgctcctccaggcgcttcacccgctcggcggtgctcggcgaggtcagccccactcgcgcgctcaggaccttgagcgaaactctggcatcctgagtcaggcaggtgaggatcgccctgtcaatttcatcaagtacgtcattcatatatttcacctaattataaaaggcatttccccccttctaccttaattcagccatatcaccctgtcagggtttttcgcacaataactaaaaaatggtggaggtgaaaaatgcaacttacccgcggcgtctggcagatgagcctggcaatgataatctccggctcgatcggcgcgttcgtgctgctctctggtttgccggtgactgatgtggtgttctggcgctgcctgattggcgcgctaaccctgctggtgtttatcgtgttaagccgccagcccttcagccggctaacgcgtttcactctcgctctggcggtgattggcggcgcggcgctggtcgtcaactggctgctgctgtttgccgcctattcgcggatctcaatcggtatggccaccgtggtctataacacccagccgtttatgctggtactgatggggatggtgctgggggaacgggtcagcgccgtgaaatggggatggttactgctggcctttggcggcctagtgatcctgctgtcgagcgagctgacgcctgcacacgaagaggggcttaccaccggcgtgttgctggcgctgggcgcggcattcttctatgccctgaccgccatcatcgcgcgcaaactgcatccgctccccgcgcagcatatcgccttcattcaggttctcgtcggcgtcgtgatgctgctgccgctggtgcatgccccagaattgacggccagcttcccctggcgctatctgctgatcctcggcatcgtccataccgggatcatgtatcagcttttatatagcgcgatacagaaactgccgacgcccgttaccggttcgctctcctttatttatccgctggtggcgatggtggtcgactatctggtcttcaaccatgcgttatccgcggtgcaattgctcggtgggatgcttattctgtttgccgccgcagggaataatctcggctggggcgaaaaaaaaccccgccgcggcggggtcagtgagcagtcgcgggccagttagcgacgggcgcggacaatctggtatttgcgcgtcaggtattcgaccggcgcgctccagatatgaaccagacgggagaacgggaacagcaggaacagggtcatgcccagcaccaggtgaacgcggaaaataaacgccacgccatccagatgctgtgacgcgccgccgtggaacgtcaccaccgactgcgcccagccgaccagtttcatcatttcactgccgtccatatgctgagcggagaacgggatcgtcagcaggccgagcgcacactgcaccatcagcaacgagaggatcagaatatccgctccggtggtggtggcgcgaacgcgcgggctcagcagacgacgcttgagcagcagtaacccgcccaccagggtcatcacgccgcaggcgccgccggcgatcatcgccatcttctgcttgacatcgatcggcaggaaggactcatacatccagtgcggggtcagcatgccgaggaagtggccggcgaaaatacccaggatgccgatatggaacaggttcgacgccaggttcatccccttacggtccagcatctggctggaggcggcgcgccaggtgtactggccatagtcatagcgcaaccagctgccaatcaggaacaccgaacccgcaatgtacggataaatgtcaaagaagaacatattcaggaagtgcattattgctgtcctccgttagagatattcagatattgcggggccacggctccggcaaaacgacgctggtgagcggaaatttccgactcgccgcagccctggtcggcaaagaatttgacctgttcttcttcccagacggcgtccagcgcctgcggcgtatcgtcgcgcgcttcgtcggcaatcttctccgccaccttctggctgtcgacctgcgtattggccagcttcagcaacagctcgaacagcaccgcatagcgactttcgcgctgctgcaggcgcgcgctgagcagaccgaggatcggcgcgacgtcccgcaggccgccaagcgcttcctcttccggcagctgcgccagatactccagatatagcggcagatgatccggcagctcatggctatccagcagcaggccgtggcgctcgtactgcgccatgagatccaccatcgcctgcccgcgatcgcgggattcgccgtggacatgttcaaacagcagcagcgaggtggcccggccgcggtcaaacagttcgctataggccgcctgggcgtccagcggatcctgagccactaaatcgcgcaggaaaacgcccagcgcgtgggcatcctctttgctgagtttctctgatgacgcgagcgcctcgaacatctcctgctgatgctgccataaggcagcgtcaggatattcgagcagacgcgatacaatcacgagttcaatcatgcgtgcggctccgttttgctggtcacgtcgatggcgtcgatgcgacggctgttgaacaggttgaactgactgtcagagccatggcagccatcgccaaagctaaagccgcagccgtttttctccggaaacgcttctcgcgcctgttcacgatggctgctcggcaccacgaaacgatcttcgtagttggcgatcgccagatagcgatacatttcctgggcctgcgcttcgctcagccccacctcttccagcgcgcgggtatcaacgacgccgtcaacggtttccgcacgcttatagtggcgcatcgccagcattcgtttcagcgccagcagtaccggctgggtatcgcccgcggtcagcaggttcgccagatattgcaccggaatacgcaggctttccacgtccggcaggatcccgttgctacccagttcacccgcatcggcggcggactgaatcggcgacagcggcggcacgtaccagaccattggcaaggtgcgatattccgggtgcagcggcagggccagcttccagtccatggccattttgtaaaccggcgactgctgcgcagcttcaatgaccccctgcggtacgccatctttcagcgcctgctcgatcacttttggatcgttgggatcgaggaacacgtccagctgacgctgatacagatctttctcgttctcggtgctggcggcgttttcaatcgcgtccgcgtcgtatagcaggacaccgagatagcggatgcgacccacgcaggtttcggagcataccgtcggcatcccggattcaatacgcgggtagcagaagatgcatttctcggatttcccgctcttccagttgaaatagatcttcttgtacggacagccggtgatacacatccgccagccgcggcacttgtcctggtcgatcagtacgatgccgtcttcttcacgcttatagatggcgccgctcgggcaggtcgcgacgcaggccgggttcaggcagtgctcgcacaggcgcggcagatacatcatgaaggtgttttcgaactggccgtacatcgccttctgcatgttgtcgaagttctgatctttggcgcgtttttcaaactcgccgccgaggatctcttcccagttcggaccgctggtgatcttgtccatccgctggccggtgatcagcgagcgcggacgggcgatcggctgatgtttgctctccggcgcgttatgcagattctggtagtcataatcaaacggctcgtagtaatcatcgatgcccggcagatgcgggttggcgaagattttacccaacagcatcgcgcgattgcccatgcgcggctgcagtttaccgttgattttgcggatccagccgcccttccatttttcctggttttcccagtcgttcgggaaaccgacgcccggcttactttccacgttgttgaaccaggcgtattccatcccttcccggctggtccagacgtttttacaggtcaccgagcaggtgtggcagccgatgcacttatcgagattcagcaccatgccgacttgtgaacgaattttcattttacgctctcctgtacctggtcgttgccttcgccgtctaaccagttaatgttcttcatcttacgtaccaccacaaactcatcgcggttggagccgacggtgccgtagtagttaaagccataggccaggtggccgtagccgccgatcatgtgggtcggtttcggcgtaatacgggtgacggagttatggatccccccgcgctgaccggtgatttcagagcccggcaggttcacgatacgttcctgcgcgtgatacatcatggtcatcccggctggaacgcgctgactcaccaccgcacgcgccgtcagggcgccgttggcgttgaagacttcgatccagtcgttatcttcgatacccagatctttcgcatccgcttcgctcatccagacaatcggcccaccgcgcgacagggtcagcatcagcaggttatcgctgtaggtcgagtggataccccatttctggtgcggggtcaggaagttcagcgccttctccgggttgccgttggacttctcgcccatcaccgctttcaccgaacgggtgtcaatcggcggccgatagaccagcaggctttcgccgaagtcgcgcatccactggtgatcctgatacagcgactgacggccggacagcgtgcgccacgggatcagctcgtgaacgttggtgtaaccggcgttgtaggagacatgctcatcttccaggccagaccaggtcgggctggagataatcttccgcggctgcgcctgaatgtcgcggaaacggatcttctcgtcttctttgttcagcgcgaggtgcgtatgctcgcgaccggtgatctcgctcagcgcttgccacgctttcaccgccacctgaccgttggtttccggggccagggtgaggatcatttccgcggcgtcgatggccgtttccagcttcggctggcctttcgccgggccttccgccttggtgtagttgagcttacgcagcagatccatctcgctctgggtgttccaggcgatgcctttcccgccgttgccgatggtttccagcagcgggccgatcgaggtgaaacgctcgtaggtcgccgggtaatcacgctcaaccggaataatatgcggcgcggttttcccggggatgagatcgcattcgccttttttccagtctttgacatccagcggctgcgccatttccgcggcggagtcgtgctggatcggcagggtcaccacgtcggtttctttaccgaggtggcccacgcacacttcagagaatttcttcgcgatacctttatagatctcccagtcgctcttcgattcccaggctggatcaacggcggccgacagcgggtgaataaacggatgcatatccgaggtattcatgtcgtctttttcgtaccaggtggcggtcggcagcacgatgtcggagtagagacaggtgctcgacagacggaaatcgagggtcaccaccagatccagtttgccgtcgaggccgttatcccgccattcgacttcttccggcttcacgccgccctgcttgcccaggtctttgccctgaatgccgttctcggtacccagcaggtacttgagcatgtattcatggcctttaccggaggagcccagcaggttggaacgccagataaacaggttacgcgggtggtttttgccattttccggctgctcggccgcaaagcgaatcgagccctctttcagcgacttcacggtgtaatccaccggggtcatgccggcttttttcgcttcgtcagcgatacgcagcgggttgacgccaagctgcggcgccgacggcagccagcccatccgctctgcgcgcacgttaaagtcgatcaggtggccgctgtaacgggatttatccgccatcggcgacagcagttcctgcgcggtcaccgtttcatagcgccactggctggagtggttatagaagtacgaggtactattcatgtgacgtgccggacgctgccagtcaagggcgaacgccagcggctgccagccggtctgcggacgcagtttttcctggcccacatagtgcgcccaaccgccgccgctctgaccgacgcagccgcagaagatcagcatattgatcaggccgcggtagttcatgtcgaggtggaaccagtggttgaggcccgccccgacgataatcatcgaacgaccgtgagttttatcggcgttatcggcaaattcacgggcggtacggatgatatgcgcgcgggagacgccggtgatcttctccgcccacgccggggtgtaggctttcacttcatcgtagccggcggcgcagttgtcatcgttcagaccgcgctccaggccgtagttagccatggtcaggtcatacacggtggtgaccagggcggtagagccgtcggccagctgcaggcgtttggccggcagtttgtgcagcagaatgttttccagatcgactttgttgaagtgctcagaaccttcgccgccgaagtacgggaagccgacgttcgccacttcatcatggctgcccagcaggctcagacgtagctcaatctcttcgccagttttaccgtcgcgctgttcgaggttccatttgcctttgtcgccccagcggaatccgagggagccgttcggtacggtcatgtcgcccttctcgtcaaaggcgacggttttccattccggattgttctcctgaccaagggaatccacgaggtcggatgcgcgcagcgtacggccggcggcataataaccgtcgcgctcctcgagcatcaccagcatcggcatgtcggtatagcggcgcacatagtcggtgaaatactggctcggcttatcgaggtggaattcacgcagcatcacatggcccatcgccagcgccatcgcggcatcggtaccctgcttcggcgccagccacagatcgcagagtttggcgatttcggcgtagtccggagtgatggctacggttttggtccctttatagcggacttcggtaaagaagtgcgcatccggggtgcgggtctgcggcacgttggagccccaggcgatgatatagctggagttataccagtcggcggattccggcacatcggtctgctcgccccaggtcatcggcgaagccggcggcaggtcgcagtaccagtcgtagaagctcaggcaggtgccgccgatcagcgacagataacgggcgccggacgcgtaggagaccatcgacatcgccgggatcggcgagaagccagccacgcggtccggaccgtaggttttgacggtatagacgttggaggcggcaatcagctcattcacttcctgccaggaggaacgtacaaaaccgccgcgaccgcgggcctgtttgaagcttttagctttgtcggcgtcttcgataatcgacgcccatgcctcaaccggatcgctatgctgaactttcgcttcccgccacatcttcatcaggcgtttacgcatcagcgggtatttcaggcggttagcgctgtacaggtaccaggagtagctggcgccgcgcgggcaacctcgtggttcgtggttcggcaggtccgggcgggtgcgcgggtagtcagtctgctgcgtttcccaggtcaccagaccgtttttgacataaatcttccagctgcatgagccggtgcagttgacaccgtgagtggaacgcacaattttgtcatgctgccaacgttgacggtatccatcctcccagtcccggttggtgtttagaagctggccgtgcccatcggcaaaggtttcacccttctgtttgaagtagcgaaaccggtccaggaatttactcatcgggtttctcctgatatggagcctgacggctctctgataaatcgacattgctggatttgcagcgaaggtaacgctatgaaagagggcgagaattgatagcgatcaatccgaactggcttgttactgtgcagcaaaacctcgattaccaccaaggtggtataagatgttattttttaaattattgttttttaatgattttcacctcaaaaagcggcgcctcatcgggatttgttaacaacggaggtattaaggggtagagccatttcactggcaagcccacctgttctggctcagcggtcgatgcggacaatattctccaacagtatgttgtaactaattaagcggttaaaaaaggcgcctccgtggggagcgcgcctttttatacgccaacgttaccgcggccgattactgacgcttacgaccgtataccgcccaggtgatcaccacgcaggcaatatagaacacgaggaacactttcatcgccccggccggcgagccggtcagatccagcgagataccgaacgctttcggaataaagaagccgccgatagcaccaatggcggagataaagcccagcgccgccgcggtatcggtcgccgcctcgcgcatcgcctgcgcttcgctgccgccctgggccttcacgcggtccatagtcagcttacggaagatcacggagatcatctggaaggtggaggcgctccccagcccggcggtcaggaacagcaccataaacaccgcgaagaaggcgataaagttaccgccctggccgttggtcggcagggtcaggaacagcagcgcgcagaagacagccatcaccacaaagttgaccagcgttacgcgggtcccaccgaggcggtcggagatcgccccgcccatcgaacgcgccagcgcgccaatgaacgggccgaagaaggcgtaatgcaggatctgcacatccgggaactgagtttttgacagcatcgcgaacccggcggaaaagccgataaaggagccgaaggtcgcgagatagagcagcgccataatccacagatgcaggcgcttaagtaccggcaactgctcgctcagcgacgctttcgaagccgacaggtcgttcataaagaaccacgccgccagagtgaaaataatcaggaaaggtacccagatccacgcggcgttttccagatacagcatcgagccgtccggttgctcgctaccgttaccgccaaaaacggcaaagatagagatcgagaccaccagcggcgcgaccagctgcatcacgctgacgcccatattgccaagtccgccgttaacgccgagcgccccgccctgcttcgctttcgggaagaagaagctgatgttggccatactggaggcaaagttggctccggcgaagccgcacagcagagagataatcacgaagatgctaaacggcgtagaggtatcctggaccgcgaagcccagccagacgcatggcacaatcatgatcccggtgctgaacgccgtccagcgacggccgccgaacagcggcaccataaaggcgtaaggcacgcgtaataaggcgcctgacagcgccggcagcgcggtcagcataaacagctgatcggttgtaaactgaaagcctactttgttgaggttaacggcaaccgcgctgaacaacatccaaacgcagaacgccagtaacagacagggaacggagatccataaattgcggcttgccacacgatggccgcgctgttgccagaattcaggatcttcaggccgccagtcggttatgaccgagcggttagccttctccgggagggaagattgactcatagatacctctgattattcatatttcctgccgctaccttaggggttacccggggcggtaagttgatataaatcaaaggaaaagcgcgagctaatttgtgcaaaaataaaccatgcctccaagtgagtagagaatggcggggaaaaaagtgtggtttttcacgctgctgccgggttgcgtataatcccccccctaacatcgcctaccaccgacaattaaggagtaactctttaggggtatgggtatactccaggggatagtcgagaataagcgccactcccggagacatgaccggtcaggagccacgcattccatgttaaaacgtctttttaccccgctgacgctggtcaatcaactggcgttaatcgtgctgctcgccacgattattggcgtcgccggcatggcgatctccgcgcgcctggtgaacggcgtgcagggcagcgcgcacgccattaacaaggccggttcattgcgtatgcaaagctaccggctgctggcggcgatcccgctgaatgaaaacgatcaaaaactggtggcggacatgaccgccaccgtcttcagcccggagctgcaaaattccgcccgccgcgacggccaggaaatccagcttaaagccctgcagcagtactggcagctggcgctggcccccgggatgcagcgcgcagtcaatcaggcggaagtggcccaggatgtcgccgactttgtcgatcgtatcgaccagttggtcaccgcattcgaccacaccaccgagcagcgtatcgaacgggtggtctggatccatcgcatcctcgccattggtatggcgctgctgctgatcttcactatcatctggttacgcgcccgcctgctgcggccgtggaaacagctgctgagcatggcgcgcgcggtgagccagcgtgatttcacccagcgggcgcacatcagcggccgcaacgaaatggcgaccctcggcatggcgctgaataacatgtcggaagagctggcggaaagctacgcggtgctcgagcggcgggtgcaggagaagaccgccggactggagcagaagaacgagatccttgctttcttatggcaggccaaccgccggctgcactccagcgccccgctctgcgaacgtatttcgccggtactgaatggcctgcaggggctgacgctgctgcgcgatatcgaggtacgggtttacgacctggaagacgaagataatcaccaggagtttacctgccactcggatgatgactgtgatgataaaggctgctacctctgtccacgcaatctgccgccgctgccggatgggggaacaacgctgaagtggcggctgtcagatgcgcatagtcagtacggcatcctgctggcgacgctgccggttggccgccatctcagccacgatcagcagcagctggtggataccctggtggaacagctgaccagcaccctggcgctggaccgccatcaggagaagcagcagcagctgatcgtcatggaagaacgggccactatcgcccgcgagctgcacgactccatcgcccagtcgctatcctgtatgaagatgcaggttagctgtctgcagatgcaaggcgacgccttgccgacggaaagccgccagctgctggggcagatccgtaacgaactgaatacctcgtgggcccagctgcgggagctgttaaccaccttccgcctgcagttgaccgagccggggctgcgcccggcgctggaggccagctgtcaggagtacagcgcccacttcggctttacggtgcagcttgattaccagctcccgccgcgctttgtgccctcgcatcaggcgatccacctgctgcagatcgctcgcgaagcgttgagcaacgctctgaagcatgccagcgcaaccgaagtaaccgtgacggtgtcacaacgcgataatcaggttcgtctggtggtagcggataacggccgcggcgtaccggaccacgccgaacggagtaaccattacggtttaattattatgcgggatcgcgcccagagcttgcgcggtgactgtcaggtacgacgccgggaaaccggtggaaccgaagtgatcgtcacgtttatcccggaaaaaacgttttccatccaataaggagaccctcatgagtcaacaggaacgggcaactatccttctcattgacgaccatccgatgctgcgcaccggcgtgaaacagttgatcagcatggcgccggacatccaggtgattggcgaggccagcaatggcgcgcaaggtatcgagctggccgagtcgctggatcctgacctgatcctgctggaccttaatatgccgggcatgaacggtctggagacgctggataagctgcgtgagaaatccctttctggccgggtagtggtcttcagcgtctccaaccatgaagaggatgttgtcaccgccctgaagcgcggcgccgatggctatttgctgaaggacatggaaccggaagatctgctgaaagcgctgcagcaggcggccgccggagagatggtattaagcgaagcgttaacgccggtgctggccgccagcctgcgcgccaaccgcgccacctccgatcgcgacatcagccagctgaccccgcgcgagcgcgacattctcaagctgatagcccagggactgccgaacaaaatgatcgcccgtcgcctggatatcaccgaaagcaccgtcaaagtacacgtgaagcacatgctgaagaaaatgaagctcaaatcccgcgtggaagcggcggtatgggtccaccaggagcgaatcttctaaggcgagtccgtccaggagacgcctggcgtggtaaacttgaccagcggctcggtcaacgccagggcgatctcattggaggagacgcgctgcccctgtttatcctccaccaccaccgacaggcgccagcggttcgcggcgcccggttcactgttccacaccggcataatgatgctccagccatcggggctgctggcatctaccggcggcgtcaggctgagggcctgggtgtctccctgccagtgcagcgccttgatgccatgcagactatggatctgcagcttcaactgcaccgtctccccggactgcagatcccagggcggcgtggccagatagaccgtcagatttttgcgctgacgatactccaccaccggcagattatcccgctccggactatcgaagcggctcccgcgcagcgagttgctgatcgccacctcgtctgccgcaagctgctgcttaaggggtacgccaaagcggtagtttagcttcaggcccacattgttctggctgacgccattttccccctgcttatgcttagcggtcaccgtgaccagcgggaccggggtgtaattgagcccaacggagacggccaccggattatggtagccggtgccggagtgaaacagatcgacgctatcgccgaaatactgttcgacgctgacgctggtgttgatgtgctggtagaacggcagccgcgcctgggcggtgacgtcataccctgcggccatccgctgctcctgagtctgattatcgcgtagctgccagtcgccaagcggatggtaatagtttgccgacaggcggagatattctccccacgcttcggcgccaacgctgccgcgcgccaggctttcgctcagcactttatcgtaaaacgagttatagcccagcagccaaccgccgacccgccaacgctggccaagcccgatgttgcccaccagatcgtgctcgcgccgggtcaccgagtactggttccacgtcagataacggtcgttatcctgcaacggcacgaaccagctccctttactgccggtgaatttcccctctttatcgaccagcaggtcgacattggcgttgccccacggcgagagccaactctccagctgatgactcacttcattgccgattttactgatggcaaacagctgcgcctgttcacccgccgtcagaccattgtcgctcatgctggcctcgccaaacttcttcgccacttcggcaaagtgccgggcgtcgtcatcaacctggggagcaatccccatatcgggcagcggatcttgcgcttgcgcagggcgggtggtgtcgctggcggtcagcgcccagacgggaacgcccggcaacagcaggagaaaggtcaacgttggcaacaaacggaacgacacaggcattaacagagtttgcgcaagctcacaaaaatggatagaagtgttagtttatcgttttttccctgctcccgcagccctgtgggcaattccaggaataagctgaaaccggttgggtaaggtgccgcccaaccggaggcgtcgccgcgcgccaccgttacgcccgggttcgctgcgccgccagcagcgcgttgagctccggcacgcaagagccgcagttggtcccgcatttcagcttcccacccagcgccccgacgctggcgcagccgctggcgatggcctcgttaattgaccattcccccaccccaaagcagctgcagacgatccgcccccgcggcgcgacggcggcgcccggtcggccgctaagcaaggcatgtcgttggacagcatcggacggcggcgcggcaaaggcagcgcttatccatgcgcaatccaccgccggctcgcgcgcatcgctccaccagccgagcatcagccttccctgatgccaggccagcaggttccacaccgcaccgccgtcagccacctgtaactgccagccgcgccgggcgcaccacgcgctgagccactgtcgggcagatgcctccccggccagcgagtagtgcagcacgcctggcgccgcccgccgccgccagtgccaggccgcaggaaatggtagcggttcgcggcaaaaaagctcgctgtgccaggccggttgccaggcggcgatcgccaccgccgcctgtttactttccggctggccggaatacgggtccgtgacggcggccagcaggttattcacccgcccctgacgggcaaactggttgttccagtgcatcggaacaaacagcgagccggggcgctgcccttcgctgatcgccactttcgccaccatcaccccatgccgcgaccagatccgcgccagcccgtcagcgggaagctgatagcgaacggcatcctgcggcgccacctccaccattggctccgcgatatgctgcatcagccgcggcaccgcgccggtacgggtcatggtgtgccactgatcgcggatccgcccgctgttgaggatcagcggataaaaggcatcggttgtcgcccgggtcggttgaggcgtcaccggcaccatccgcagcctgccatcgccatgccagccgcgcgtgatatcccaggcgacctcgctgcggctgaccggccagcgcaccggcggcatggtgtcccacgcctcacggctgagatccgccagcgcgccgatatcaaacgcccgctggccgtcgttttcgaaaccggacagcgccgcatgctcgcggaagacgtcatgcggatgctgccaggcaaacgcctcgcgataccccagagcctggcccactctggcgatgatccaccagtccgctttcgcctcccccggcggcggcagaaagctgcgctgacgggagatccgccgctccgagttggtgaccgtgccattcttctcgccccaggccagcgccggaaagcggatgtgggcgaaacgtccggtatcggtctgggcggcgacatccgagacgatcaccagcggacaggcggccagcgcctggctcaccgcgtggctgtcagggagcgacaccaccgggttggtacccatgatccagaccgctttgacctcgccgcggccaatggcggcaaacagctccacggcggtcagcccgggggtctgcgccagccgttccgtcccccagaagcgggccagccgctgcagatcgtctggcacaaaatccatgtgcgccgccagcatcgtcgccagcccgccgacttcgcggccgcccatggcgttgggttgaccggtcagcgaaaaggggccgcagccgcggcggccatacttcccgctggccagatggacgttgatgatggcgttacatttgtcgctgccgctggcggattgattgattcccatggtgtagagggtgatcgcccgcggggcggcgatgaactcgcgatagaatcccgccacctcatcggcaggcagaccgcaaaaggccgccaccctcgccacgtcccagccgcgggcggcggccagcgcctgcgggccgtcgcgaaagccatcgacgcaggctcctgcctcagccagggcgttaagcagccccgcaaacaacccgccgtcgcttcccggggccagcgccagatggcggtcggcgatctcgcaggtagcggtgcgtcgggggtcgatcaccacgatccgcaatcggggattatcccgcttcgcctgcgccagccgctggaacagcaccggatgcgcccaggcggcgttcgagccgaccagcaccaccagatcgctgttttccacatcatcgtagctgcagggcaccacgtcggcgccaaaggcccgcttgtagccagtgaccgctgacgacatgcacagccgtgaattggtatcgatgttcgccgcgccgataaaccctttcatcagcttattggcggcatagtaatcctccgttaacagctggccggaggcgtaaaaggccaccgcttgcggtccgtgctggtcgatgatctgtctcaggcgcgcagcggtttccgccagcgcctgaggccaggctacctgctggccgtcgacctccggcgtcagcagccgccccgccaggcccgtggtctcccctaaggcagcccctttgacgcacagacggccgaggttcgccgggtgctgatcgtcgccgcgcacgctcacctgccccgcgtcgtccacgctcgccagcaccccgcagcctacgccgcagtaggggcaggtcgttcggatggtcttcatcaggaggcctccgcgcgggccagcagctgctggttgcccacccacactttgccgttttccactttcaccggccaggcgcgtaccgcctgttcactgccgtcgcacggccagccgtcgcgcaggcgtatccgctgtttgtacagcggggagatcaccaccggctcgccgccgacgtcccctaacagcccacgcgacagcacgttggccgcgctgcccggctcgcggttgtcgagggcgtagacccgctcgccgaagcggaacagggcaatctgccgctcccctaagcgggcgccgatccccgcctgcgccggaatggcgtcaaggtcgcataccgcctgccacggtcgggatgggagttcgccttcgggcaacgtctcagtcagcagcggctgcggctgaccgcgcagatcgcggcgctgcacagcctcgtcgggctggtcgctattaacgaaggagcggaacagcgccagacgctgcggatcgttgagggtggtctgccactcgcactggtagctgtcgacgatccgggccatctcctgctccagctcctcgccaatgccaagactatcctccagcaccacctgccgcagataggcgacgccgccctccaggttatccatccaggtgctggttcgctgcaggcgatcggcggtacggatatagaacatcagcagacgatcgatgctgcggatcagcgtcgcttcgtcgagatcgctggcaaacaggtcggcgtgacgcggtttcatcccgccgttgccgcagacgtacagattccagcctttgtcggtggcaatcaccccgatatctttcccctgggcttcagcgcattcgcgggtgcagccggagaccgccatcttgattttgtgcggggcgcgtagccctttatagcgatgctcgagccgtaccgcaagcccggtggagtcctgcacgccgtagcgacaccaggttgagccgacgcaggatttcaccgtgcgcagcgacttgccgtaggcgtggccggtttcaaacccggcgtcggccagctcgcgccagatagccggcagctgttccagccgcgcgccaaacaggtcgatgcgctggccgccggtcactttgctgtagagctggtaacgtttggcgatctgcccgatggcgatcagtccgtccggcgtcacttcccctgccgccatccgcggcaccaccgaatagctcccgtccttctggatattggcgaaatagcggtcgttggtatcctgcagcggcaggtgcgccggcttcagcaggtactcgttccagcaggaggccagcaccgaggccaccagcggtttgcagacatcgcagccgtgcccctggccgtagcggctaatcaactgctcgaaggtatggatatggttaacccgcaccaggtggtagatctcctggcgcgaccacgggaaatgttcgcagacgtcttttttcacttcgacgccctgctccgccagctgatactccatcacctgtttcaccagcgcgctgcagccgccgcagccggtagccgctctggtgcagctttttatcgccgacatatcccccgccccattgttcaccgcctggcagatatcgcctttgctgacgttatggcaggagcagatcggcgcgctgtccggcagcgccgcgacgccgagcgccttcggcgcggctccctccagcgcgggcaggatcagactctccggacgcggcggcagcgccatgccgttcagcatcatctgcagcagcgtggcatagtcgctggcatcccccaccagcacgccgccaagcagggctttgccgtcctgactgacgacgatttttttgtaaatctgctgcggaccgtcggtccattgatagctctgacagcccggcgtgcgcccctgcgcatcgccaaacgaggccacgtcgacccccagcagcttcagtttggtgctcatgtcggcgccgctaaagcaggcgtcctctcctgcgagagtggccgcggcgatgcgcgccatctgatagcccggcgccaccagaccgtaaattttattgtcccacagggcgcattcgcctatcgccagcacgtccgggtcagaggtgcggcactggccgtcgatgtgaattcccccgcgttcgcccacctgcagcgcgcagccgcgggccagcgcgtcctgcgggcggatccccgccgagaagaccaccatgtcggtccgcaacgcgccgccgtcggcaaagttcagccgcaggccgtcggcctcgcgcacgatggcggtggtcgctttgctggtatgcacccccacgccgagggcgacaatcttctcccggagcatcgccgccccgccgttatccagctggacggccatcaggttcggggcaaactccaccacctgcgtctccagccccagctgtttcagggcgttggccgcctccagcccgagcagcccgccgccgataaccaccccgctcttcgccgcggcggcatgggcggcgatacggtcgagatcgtcaagagtgcggtagacaaagcaccccgcgagatcgttaccggggattggcggaacaaagggatacgagccggtcgccagcaccagtttatcccagtggatttcatgcccctcggcgtcccgtaccagccgtgcgtcgcggtcgatggtcgccaccgcctcgccgaggcggagttcaataccatgttcaataaagaaatccccggccgccagcgacagcgactcggcgctgcgtccggcaaaatactcggagagatgtacccggtcgtaggcgggataacgctcttcgccaaacaccacgattcgatattgctgatgcagattgcggctcacgcattgttcgagaaaatggtggccgaccatgccatgtcccaccagcactaatacaggtttcgtcatcgtcattattcctgcagcctgcggctgcgttgaagaggggtcaaaaagccagtccacggtggcaggctcatcgctttccaggcgcgcggtaagcgcggcggcggcggtgcagtcgcccatcagcagcacgccgcgcaggcggccatcgcgcagcagcaggcgacgatagtggcggtcgatggggtcccagctggtataaatgtcatcctgttcgccggcctgctgctcgccagcgctaaagagttcaatgccggtgaccttcaggcgggtcccggcatcctgccagacaaagccctcgccgggggcgccgcacaggcgatccgccagcacctcggcctgacgcaggcagggagccaccagcccccaggtctggccgtcaatttcgcaacattcgccgatggcgctgatccccggcagcgaggaggccatctgacggtcgaccacgatcccccgctggcacagcacgccggactgcgccgccagacggctgtcgggctgcacgccggtagccagcaccactctggcggcgcggaatacgcgcccgtccgccagccgcacgccatcggcgtcgatggcggcgatgcggcacgccagcacgcagcgaatgccgcgcgcttcaagctgctgcctgagctcatcggcggcaaaagcgtcggtcagcggcgccattaatccgctgccgcgatgcagaagagtgacctctccgccgtgacgacgcagcgccgccgccgcttccacccccagcaccccaccgccaatcaccaccgccgggccgggtatcgccagaatacgttccacgtccgccagggtgcggaagggcataacctgcggacgatcaatgcccggcagcggcgggataaagggccgcgaaccggtggcgaacaccagctcatcccacggcagccaggtttccgcgatgcgcagccgccgttgctgaatatcgacttcatcgaccgcctcgccagaccgcaggcacaccccgtgccgggtgtaccactccgccggcagcaacgggatctgcgccgccgttttttcacctgccagcagcggcgagagctgaatgcggttataggccgggtgcggctcgtcgccgacgacggtaatggcaaaccgcgcggggtcgcgctcaaccagccgctgcaccagccgggtggccgccatgccgttaccgatcaccaccagtcgccgcgtcatgaccgcctccttacgccgctttcggctgtttttcatacaggaaatggaggatctgctggcgcagatggtgataccggctgtcgtccgccagctgaacgcggtggcgcggacgcggcagatcgaccgagaggatctcgccgaccgtcgccgccggaccgttggtcatcatcagcacccgatccgagagcagcaccgcttcatcaacgtcgtgggtgatcatgacgatggtggtattgagctcctgctggatatgcatcaccgtgtcctggaggtgggcgcgggtcagcgcgtccagggcgccgaagggctcatcaagcagcagcactttcggcttcatcgccagcgcccgggcgatacccacccgctgcttcatgccgccggagatctccccgggacgtttgtgcagcgcatgacccatctgtacgcgcgccaggttgtgttcgatccactcccggcgctcactcttgctcatggtgcgacggaacacctgatccaccgccagcgccacattgtcgaaacagctcagccacggcagcagcgagtggttctggaaaaccaccgcccgctccggcccgggaccggcgatttcccggttatcacacagtagtccgccctcggtaggggtggtgatcccggcgatcaggttcagcagggtcgattttccgcaacccgagtggccgatcaggctaatggtctccccttcgacgatatcgaaggagacattctgcagcgccaggaactcaccgctggcggtgttgaagcgttggctgacggcctgcacctgaattaatggtttcatgttggctccttatttttcctgccagctaaagcggcgagcgagcagcatcaggccctgctccagcagcaggccgacgacgccgataatgacgatggcgatgatgatgttttccacattgaggttgttccactcgttccagatccagaagccgatccccagcccgccggtaagcatttccgccgccacgatcaccagccaggcgatgccgatggagaggcgcacgccggtaagcaccgccggcagcaccgccggaaagaggattttgcgcatcaccgtccactccgagagctggaggacgcgggcgacgttgagatagtcctgcgggatccgccgcacaccctccgcggtgttgatcaccatcggccagatggagcagataaaaatggtccagctggaagccggctccgccttctggaacagcagcaggccaatcggcagccaggccagcgggctgaccgggcgcagcagagcaatcagcggattaaacatgcgggcgaagaacagcgaacggccgatcaaaaaccccagcggaatgcccgccagcgccgccaggccgaagcccaccgccacgcgctgcagggaggccagcacgttccagccgatgcccatgtcattgggcccgtcctgatagaacggatcggcaaacagggtcagcgccgagtccagcgtgctcagcggcgtgggaaagcctttgctatgcatcgccgccagctgccaggccagcagcagcacacccagccccaacagcgggggcagcaggcgctgggtgagctcacgcagccagcgcgtgacggtcggcgtggtgcgccggacctgcaccggcggcaggataatcacttcgccaggcgcgttgtccacgctgacgaccggttgcttacgttgtgcctgcttcatctcatgcccccttacgttgaatagagaaatggcgggcgtagccttccgggtcggacccgttccagaccgtcccgtccattagtgtgctgctgcgcatcctggctgccggcgcgctgatccctcctaccgcctgggcggcagcctgccagacatcgatgcggttaatgcgcgacgccaccgcgaggtaatccggggcctgcttcagcaacccccagcggcggaactgggtgaggaaccacatcccgtccgacagccacgggaaactcacctcgcccccggcccagaagcgcatcggatgggcatcctgccagcggcggccaaggccgttgtcatactctccaagcatccggccggtgaggtattgctccttggtattgagccagccgcgtctggcgagcaggcgggccgtctcccgggtgttctccggcgaggcggcgatccagcgctgcgcctccatcagggccgccaccagcgcgcgggcggtgttcgggttgcgttccacccagtcgcgacgggtgcccagcaccttttccggatgctcgggccagatatcctgggaagtggccgcggtgaagccgatacggtcgttaatagcgcgggcgttccacggctcgccgacgcaaaagccgctcatattgccgatgcgcatgttcatcaccatctgcggcggcggcaccacgacggtgcgcacatcgttgaagggatcgatgccggcgctcgccagccagtagtaaagccacatggcatgggtgccggtaggaaaggtatgggcgaaggtgtaactgcccggcgcgctgcggtcgatcagccgcttcagcccgccgaggtcggtcacccctttctcctgcagctcgctggagagggtaatcgcctggccattgcggttgagggtcatcaaattggccatcgcctgcggcttgctggcgatccccagttcgaggccgtacagcaggccatagagaatatgcgccgcgtcgagctcgccggccaccagcttgtcgcgcaccgccgcccagctggcttccttactcgccaccagggtgatgccatatttttggtcaaaccccttcgccgcggcgatggccagcggcgcgcaatcggtcagcggaataaatccgacccgcacgcgggtttgctccggtttgtccgagccgccggcccaggcggcctgcatcacgcccggcagcagcatcgcgccgcccagcgcggcccctgcctgcagcaagcgccgccgggaaattgaaaatttgtcgcccatatccgctccaccatgcgcaaaaaaaaagcgcccgacagtgcatacgcactgcaggacgcctttatccacggacacccgaaccgccattggttcgttgcccggacttttattcacttaataagtaatgcaaacgggatgccagctttggcaatagcgcgctggcgggctttttcccaacgctagccggtttttcacctaaaagtgcaccgccggcatgcaaagaatgcccatcgattgtgcatctactcctttggtgttagcggccaaatcgccttcaccatcagcagcgcgcgggctatctcaaccatacgctgatttttgtccatggccatcttgcgcagcgtctgccaggcctgctcctcctgcattccctggtgcgtcatcagcagacttttcgctttttcgatcagcttgcgctcttcgagcgcgtctttcagcgaggccagctggctggagagctgctgcagctcataggcctgctggcgcaccagcggcagtagctgtttatcgagccgtggcgtcacgctatcgtcttcctctccggcctgccagccaggcgcgtcgtctgctaacagcgcgtcggtggcatccagcagatcgtcgatcagttgctcttccacttcgcgcagttgctcaagccgttgggtttgcagaccaaaccagcgcagcgccgtttccccgccgtcggcagccggctgacgggtacaggcgatccgccgcagctgttcaatatccagaccggcgtggcactgggttctgaacaactggacggtcgccgggctgcccagcgcctgaaagctgtcgaagcagggctgctgaccgtcaatacggtccaccagctgctggcgcaggctgtcgctgaactcgccgcgggtaaagcccaatgctcccagcgcgcgctcctggcccaccagctcttttccctgcataaagctgtacagggcgaccatccgaccagccaccggcggatcgtcaatgctgtcattgagctgcggggcgatgttcagcagatggcggatgacgcggctgaactgctccgtcgcggcttcagcggcaatttgccggcggccgatctgcgcgcgtagcgccgggagctgcgccagctcgtcaaccgctctggcgatacgccagcacagcgcgctgccggctaccgcgcgcgcccgttcgaggctggcataaaacagggctagccgctcgtcaaccagcgcccctcccgcccgacactccgctgtatacagcaagccgcccgagcaaagatagatattcgacgccccgcgctcacactgcagcatatgcaccagcgcgctgagctggctggccagttcccccagttggctaagctgctgaagctgttgtttttgcaggcgacgcgccagctgcagccaggccgtcgcatcgtgcgcatgaccagtcgtattattcatacccctcctccgggttaacgctttatactgcctaaagcaataaccgtgcctttaagaaggagtttgtatgcaacgtattgtgatcatcgccaacggcgccgcctacggcagcgaatccctgttcaacagcctgcgcctggccattgccctgcgcgagcagcagtccgacctcgatctcaagctgtttctgatgtccgacgccgtcaccgccgggctgcgggggcagaagccggcagaagggtataatgtgcagcagatgctggagatcctcaccgcccagcaggttcccgtgaagctgtgtaaaacctgcgcggacggccgcggggtcagcgcactgccgctggttgacggcgtggaggttggcactctcgttgagctggcccagtggaccctggcggcagataaagtgctgaccttctgaatctggggcgccaaacggcaggaaatatcaggtttcgccgcctgcagaggtaaaaaaaacgttagctgaatgctttcaggaacaacgtcatttttgtttaatctttatccctttttttgatcaaaatcagcatcccgacccgcgccgtttggtgtgatgcacagagcaaagtgtgaacaatatcacgcgaggactgggtgggcaggatgctgtagcgggacagaaacggggtataaaatggcgatggttaaagcaagtttgacgttatttggtggtgacacgctggtggtgcggtgctcagagcgctgccatattcatctgatgagcgcgaaggtcccgggcgacagtcatgcggatattctgagcgtgcaggatcgggacagcgcctatctgacggtgccctacagcggcacctggaacgtgcttatcgacagtcacagccagtcgctggagcactccatcagctacgtgccggcctgaccgtcactgccagaacacatgcccggtcatgccgggcgtgagattcatgacaaaccccatgcaatcattgtacttgcagattgcaccagaaaaataacaaggaaaatcaatttattgattttcggctgataaccaccagtaaggaaaaaccacgctttttccttactggtcagcaatcggacgcccggtcatgccgggcgttttcttttgcgcgcgctcaggccaggcccggcgtcggactctcgcccaacagcgcgcggacgctggccaccaggtcatcgagactggcatcgtgcatgcccagcttacgcagcgcctgctcaagcgaaaacagatactgggcgttggtgccgagcggcccgctggcccgggcgattagcggggcgataacctgggcactggtatccggttcaaacagtggatggcgcggatccataataaacaccagggcattcaccgtccgtccgtcgtccagctccagcttgcaccaggtgggcagatagcagccggtgatcatctcccgcttccacagcagggtcagctcctcctccagcgtgtcgtcaggcagacgataggcgacgccggtggttcggccgccctctttgagagccagcatgcgtcccggctggcaggcactaccgcgcccggcggtcaaccgcaggcaaaacgcgcggtgccagcccggcagcgtgccggtgcaggactcgcgataattgagcgccgggttccagataagcgaaccgtagccaaagatccatactgagccatcatccgggcggcaggccagcgtcgccgccagcgaggctgcacgttgttctgccgaccagagtagcgattcctcaatagcgccaaacgctgtcttacaatccgcattcattaagaaatcacgagttaacactgtttactacctccgccactgcccgcttcccggcgttcgtctcatgcatccgtcaatattgctgaaatattatccagctttatctttcaataagcaatcagcggggcgctggcaagcgaaaaagcggcgtcagcgattatttttttttatgccacttatcatcatcgcctttctcatagctgttcttcaccgccgcccaggcgactttgtgcgccgtctcttcgcggctggcgtcatcgcgccgctcgtctttatctttatattgatcccaggcgctgttaaacgcttctttataaatttcctgcgcatgggcaggcagtacatgctgaacgctgtcggggagttcttgtttactgcgatagggcatactgacctcctgtttgagcattaagtttaagtctggtacgcagtcggctggctatcaaggtcaaaatgagtagaaaaattattttagtaattatctgaataataagaactaaatataagtaaacataaattataataaactaatcaagatatccctcgatacccgtaaatttaagtaaaaaaccagcggtaatttagcaagatctgttactttaccgccctacgtttttataattataacacctgcataaatggagatggttcatgacccatgcacatgaggcggtaaaaacccgccataaggagtcttccctcgtctttccggtgctggcgctggcggtgctgtttttctggggcagcagccagtcactgccagtggtcatcgcgatcaatatcctcgcactggtcggcattttgagcagcgccttcagcgtggtccgccacgccgacgtcctcgcccaccgcctgggcgaaccctatggctccctgattttaagcctgtcggtggttatccttgaggtcagtttgatctctgccttaatggccaccggcgacgccgcgccgaccttgatgcgggataccctctactccattattatgatcgtcaccggcggtctggtcggtttctctctgctgctgggcgggcgtaaattcgccacccaatatatgaatctgttcggcattaagcagtatcttatcgccctgtttccgctagcgattatcgtgctggtctttccgatggcgctgccgggcgcgaacttcagcaccgggcaatcgctgctggtggcggtaatttcggcggccatgtacggcgttttcctgcttattcagaccaaaacccatcagagcctgtttgtttatgagcatgaagacgacagcgacgatgacgacccgcaccacggtaaaccgtccgcccacagcagcgggtggcataccgcctggctgctggtgcacctggtggcagtgatcgcggttaccaaaatgaacgctaacccgctggaaacgctgttgaccagcatgaatgccccggtggcatttaccggcttcctggtggctctgctgatcctgtcgccggaaggccttggcgccctgaaagcggtgctcaacaatcaggtacagcgggcgatgaatctgtttttcggctccgtgctggccaccatctcgctgacggtcccggtggtcaccctcatcgccttcctgaccggcaatgagctgcgctttggccttggcgccccggagatggtggtgatggtcgcctcgctggtgctgtgccatatctccttctccaccggacgcaccaatgtgctgaacggcgcggcccacatggcgctgttcgccgcctatctgatgaccattttcgcctgaccccgttttcccacccggcggagtccgggcgaaaaaaagcctgccggttttgacgccggcaggcttttttactgatgcagtcaggcttacttgctggtatccagctcgtcgaagcttttcaccagatcgtcaatcgctttcatctgtttgaggaacggctccagtttatccagcggcagcgcggacgggccgtcgcatttcgcgtggtccggatccggatgcgcttcaataaacagaccggcgatacctaccgccataccggcgcgggccagctcgctcacctgcgcacgacgaccgccggaggctgcgccaaacgggtcgcggcactgcagcgcgtgggtgacgtcgaaaatgaccggcgagttgttggaggctttcttcatcacgccgaagccgagcatatccacgaccaggttgtcgtaaccgaagttagcgccgcggtcgcagaggattactttgtcgttacccccttcgataaacttatcgacgatgttgcccatctgacccgggctgacgaactgcggcttcttgacgttgatcaccgccccggtcttcgccatcgcttccaccaggtcagtctggcgcgcgaggaaagccggaagctggatcacgtccaccacgtcagctaccggctgcgcctggctggcttcatgaacgtcggtgatgattttcacgccaaaggtctgcttcagctcctggaaaatcttcatcccttcttccagacccggcccacgataggagtggatggaggaacggttggctttatcaaaggaggctttgaagacgtagggaataccaagcttctgcgtaacggtgacataatgttcgcagatacgcatcgccaggtcgcgcgactccagcacgttcatcccgccgaacagcacgaacggcaggtcgttcgctacgttgatatcaccaatgctaaccactttttgtttcataagttcgccttatcagggtgtaaccggaatggttccagactaatgcaatgtaatttgtttatgcgaaatcgtgttgatctgcgcgcggatcatctcgctgatcggatcctccgggcactgctcaacgaaatagctcagatccaacagcgccacgtgatcgcagtccagctgggcgtatatcagcccgcggtcgcggatctcatacggatcttccggattaaactgcagcagcgcttcgctggcgcgcagggccagctccatctgccgctcttccatcagcgccgacttcagggtgtccagcagcttgcggatcacctcggcgttatccgcttcgtcgagatcttcattaaacagttccgccaccggcccgatgttgcccttcagccatacctccagggtatgctcgtcgagggtctcgccgttaaacggattaatcagccacatctcttcgctggtttccgggtccgcacgcagcagcatctgggtcgggaagatcaccggcaccaccggcagcgccaggcgctgggcgatccacagcaggatcgcgcctaacgacaccgcgctcccctggcggttaaccagcactttatccagccatagcgcgtcggaaagacgatacacgccctgcgaggcgccaaagccccactcgtcataaaacagctccagcaatcgttctatctggcgctcctggtcccacgacggcgcaatctcctcctgcgcgaggcgcagcaatcgctgcagctcttcctcgacaaaacgcgacggaaaatcgtcgcggacctgttcagaaatgaggaccatgccatcacacaatggcgctttgttaaattcgaaatccgctaatgaccccatgacctaccccagtatcggtattcttgtgatggcgagttgaatgatgataaacaacaccaccagcgccagcaggaacgcgataaaacggctctgctggctgcgcggacgacgacggcccaacgcgataaaacctaatgcgatgtaaatgataacgccaaacagcttttcagtcagccatgcgccgtcttctgtgaacggcaggtagtgcgttatcgccattaaccctgcgccgctgagaaatagcagcgtatcgctgcagtgcggcgcaattcgcacccaccgctggttcagcagcgggctctggtgatacatccaccagtaacgtaaaacgaacaatcctaccgacaccgccactgtggcaatgtgcaggtagaggacagccgtgaataagttcatcagccaacattctccatgtcgggtaaacgtccgagggtcagacgctcattgtcgccatagtcgcgacaggtcgcgacgtccagatagcccgcttcgcggaacagcgcgcgaaccgcctcgccctgagtccagccatgctccagcagcatccaaccgccgggctgcagatactgccgtccctcgcggatgatatgcgccagatcggccagcccctggtcgcctgcgaccagcgccgtcaacggctcaaagcgcacatcgccttcggcgagatgcgggtcggcggcgtcgatataggggggattgctgacgatcgtggcgaagcgctgcccgtccagcgcgctaaaccagtcgctttgacttatcgtcacgttagcgatgcccagatgttcggcattgcgcaacgccagcgccacggcgtccggcatcacgtccaccgcggtgacctcacagtccggacgttcgctggccagcgccagggcaatggcgccggtcccggtgccgaggtcgagaatacggcacggcgcggttggcagacgcgccagcgcctgctctaccagacattcggtatccgggcgggggatcagcgtcgccggggagacgaacagcggcagcgaccaaaactcgcgctgcccgaccagatgagcaataggttccccgcgctggcgtcgcaccaggagcgcctccagcctcgccgcctcgtcagcagagagcgtcgtttcaccgaaggccaaaatccaggttcgcgcccggccggtaacgtgtcccagcaagatctcggcgtcgcgtcgcgggctgtcgctctccgccaggcgggcgatcgcctgctgcagccaggcctgaaaggtcatcattcctgctcggacagcgccgccagctgatcggcctgatgttcctggacaatcggctcaatcagcatgtcgagtttgccctccatcgcctcatccagacggtagagcgtcaggttgatgcggtggtcggtcacgcggccctgcgggaagttataggtgcgattgcggtcgctgcggtcgccgctgcccagcaggttgcggcgcgtggaggcttccgcctgctgacgtttggccacttcggcggcgcggatgcgcgcgcccagcaccgacagcgccttggctttgtttttatgctgagaacgctcgtcctggcactccaccacgatgccggtgggcaggtgggtaatgcggatagccgagtcggtggtgttaacgtgctgaccgcctgccccggaggagcggaaggtatcgatgcgcagatccgccgggttaatgtccggcatttcggcttccggcagctccggcatcaccgccaccgtacaggcggaggtgtggatccgcccctgcgattcggtggccggcacacgctgcacgcgatggccgccggattcaaatttcagccgaccgtaaacgccgtcgccgctgatcttggcgatcacctctttaaagccgccgtgctcaccttcgttggcgctgaggatctctacctgccagcggcgcgattctgcgtaacgggtgtacatgcggaatagatcgccggcaaacagcgctgcttcgtcgccgccggtcccggcgcgcacttccacgaaggcgttacgctcgtcatcaggatctttcggcaggaggagaacctgcagctgttgctccagctggtcgcctttttctttggcgtcacgcagctcttcctgcgccatttcgcgcatttccggatcgtcgagcatcatctgcgcggtttcaatatcctcctgcacctgacgccagtcggtatagcagcgcgccacatcgctcagttgagcatactcccgcgacagcgcgcggaatttatcctgatcggcaatcgtcgcggcatcgccgagcagcgcctgcacttcttcatggcgctcgtacaacgcttccagtttggcaacaatagaagacttcataggcgtgaattcaccctgtcctgaaaataagagaaaggtgcgctattccagcccgaggctgttgcgcagaatatgcagacgttcgtcgtccccgtcacgggcggcctgctgaagagatttggttggcgcgtggatcaggcggttagtgagcttgcgcgccagatcctgcataatttcctgggcatcaccgccctgctccagcgcggccagcgctttcgccgtcagctcctcacggacctgctcagactgagaacggtattcgcgaatggtctcgctggcgctctgcgcgcgcagccaggccataaattcgctggtttcctgctcgacgatcgattccgcctgcaccgcggcagccttacgctgcgccaggttatgctgaataatgttttgcaaatcgtcgacgctgtagaggtaggcgttagccagtttgccgacctctggttcaacgtcgcgcgggacggcgatatccaccagcagcatcggctggttacgccgcgccttaagcgcacgctccaccatgcctttgccgatgatcggcagcgggctggcggtggagctgataatgatgtcggcctctttcagccgttcgtcgatatcgctgagggctatcacctcggcgcccacttcctccgccagcgcctgggcgcgttcacgggtgcggttggcgatcaccattttgcgcacgtgatgttcgcgaagatggcgcgctaccagctcaatggtttccccggcgccgaccagtaacacggtgacgctggagagcgattcaaagatttgccgcgccagggtacaggcggcgaaagccacagagaccgcgctggcgccgatatcggtttcggtacgcacgcgcttagccactgaaaaggatttctggaacatccgctccagctcgctgacgttaagatggccgcggctggagtcggcgaaggcttttttcacctggccgaggatctgcggctcgcccagcaccagcgaatcgaggccgctagcgacgcgcatcagatggctgacggcgtcattatcctgatgccagtaaaggctttttcgcaggtcttcttcgttgaggccgtggtagttgcacagccagcggatcagcgcttcctgcaggttatcctgctcttcgacgctgagatagagttccgtgcggttgcaggtcgacagcaccaccccaccctgcaccatcggctgagccagcaagctctccagcgccttatcgagcgtttccggcgaaaacgtgacgcgttctcgcagggcgaccggagctgttttgtgattgatgccaagagctaaaagggtcattgtgagggagtagtaccagcgttgctaaggttagtctgagtgcatcatacaggatgcgcgtaatcaataaaagagaggctccccttttggagtaatagttaaagcaagaccgccattaaggttaattttttgatttcagacaacttgaacgtagacgctatcgcccggcgacgctagcattaagggttataaatgtaacctgctacacaaatcggcccgctgttccctgtcgccgtttttccctgtagacatcaaggatttgtcatcattatgaatcgactgttccgcctgctgccgctggccagcctcgtcctcaccgcctgttctcttcatacgccgcaagggcctggcaaaagcccggattcgccgcagtggcgtcagcaccagcaggctgtccgcagcctcaatcagttccagacccgcggggcgtttgcctatctttccgatgagcaaaaagtctatgcccgcttcttctggcagcaaaccggccaggaccgctatcgcctgctgctgaccaacccgctgggcagcaccgagctgtcgctgaccgcgcagccgggcagcgtgcagctgatcgataacaaaggccagacctataccgccactgatgccgaagagatgattggccgtctgaccgggatgccgatcccgttgaacagcctgcgccagtggatcatcggcctaccgggcgacgccaccgactattcgctggacgatcggtaccgtctgcgtgaactgaactatacgcaaaacggcaaaacctggcacgtgacctacggcggctacaccagcgatacccagccagccctaccgtccaatgtcgagctgaacaatggcgctcagcgcatcaagctgaagatggataactggatcgtgaaatgatgacccgctggccctctcctgcaaaactgaatctgtttttatatatcaccggccagcgggccgatggttaccataccctgcaaacgctgtttcagtttctcgattacggcgatacgttgaccatcgaaccgcgtactgacggccaactgcgcctgctgacgccggtggccggcgtgccggacgaggagaatctgatcgttcgcgccgcgcgtctgctgatgcatgccgccagcgaaagcgatcgcctgccggcgggcagcggcgccgatatcagtatcgataagcgcctgccgatgggcggcggcctgggcggtggctcctccaatgctgccaccgtgctggtggcgctcaaccatctgtggggctgcggtctctcggaagatgagctggcgactcttggccttcagctgggggccgatgtgccggttttcgtgcgcggccatgccgccttcgccgagggggtgggtgaaatactgacgccggtagaacccgaggaaaaatggtacctggtggcccacccgggggtcagtattccgacgccgatcatttttcgcgatccggagctaccacgaaataccccgcgccggtcaattaatacgttattaaattgtgaattcagcaacgattgcgagcttatcgcaagaaaacgttttcgcgaggttgatgccgcgctttcctggctgttagaatatgcgccgtcacgcctgaccggcacaggagcctgtgtgtttgctgaatttaacaccgaatccgctgcccgtcaggtgctggacactgccccggcatggctaaatggctttgtggcgcgcggagttaacctttcgccgctcaagcaggccctgctctgaatcctgcgccgtgatggcacattgataatgagtcagccggggaaattgagttacggtgacaacgtcaccctgttccagacgttgcatcgtgctctttaaatacaccgactggatcgaatggcgccatcccgcacattattggcccattcatccaccactggacgcatgcctgaggttcttctcgtgcctgatatgaagctttttgctggtaacgccaccccggaactagcacaacgtattgccaaccgcctgtacacttctcttggcgacgccgctgtaggtcgttttagcgacggcgaagtcagcgtacaaatcaatgaaaacgtacgcggtggtgatattttcatcatccagtccacttgtgctcccaccaatgacaacctgatggaactggttgttatggttgatgctctgcgtcgtgcttcggcaggtcgtatcaccgccgttatcccttacttcggttatgctcgtcaggaccgtcgtgttcgttctgctcgtgtgccaatcaccgcaaaagtggtggcggattttctgtccagcgtcggcgttgaccgcgtgctgaccgttgacctgcacgcagaacagatccagggcttcttcgatgtgccagtcgataacgtgttcggcagcccaatcctgctggaagatatgctgcagctgaacctggacaacccgattgtggtttctccggacatcggcggcgtcgtgcgtgcccgcgctatcgctaaactgctgaatgataccgatatggctatcatcgacaagcgccgtccgcgcgccaacgtctcccaggtgatgcacatcatcggcgacgttgccggtcgtgactgcgtgatggtcgacgatatgatcgacaccggcggcaccctgtgtaaagcggcagaagcgctgaaagagcgtggcgcgaaacgcgtattcgcttacgcgacgcacccaatcttctccggcaacgctatccagaacatcaaaaactctgtcattgatgaatttgtcgtctgcgataccattccgctggcaccagaaattaaagcgctggataaagtgcgtactctgacgctctccggtatgctggctgaagctattcgccgtatcagcaatgaagaatctatctctgctatgttcgaacattaatcgagcccagcacaaaaacccgctgcggcgggtttttttgtctccgcaccttatttgtatgatcaatgcctccttcacctgccatttagttgacagatgatgcgctcatggatgaaacattattgtgaacagattattttcctcacatgtgatgcctttccgcgccctcatcgacgcttgttggaaagaaaagtacaccaccgcccgcttcacgcgtgacctgatcgccgggatcaccgtcgggatcattgcgattccgctggcgatggcgctggcgattggcagcggtgtgccgccgcagtacggcctctatacctcagcggtggcagggattgtgatcgccttgaccggcgggtcacgctttagcgtttccggtccgaccgccgcctttgtggtgatcctctatccggtttcccagcagtttggtctggcgggactgctggtggcaaccctgatgtcggggatctttttaatcctctttggcctggcgcgctttggccgcctgatcgaatatatcccgctgtcagtcaccctcggcttcacctcggggatcggtatcaccatcggcaccatgcagattaaagatttcctcggcctgcagatgccccatgtgccggagcattatctgcagaaagtggcggcgctggcgatggccctaccgaccattaacgttggcgatgccgccatcggcgtcgttactcttggcattctgatcctctggccgcggctgggtatccgcctgccgggccacctcccggcgctgctgggcggctgcgcggtcatgctggtggtcaacttgctcggcggcgatgtcgcgacgatcggctcgcagttccattatcagctggcggacggcactcagggcaatggcattccgcagctgctgccgcagctggtattgccctgggatatgccgggctcaaactttaccctgagctgggcctcgctgcaggctctgctgcctgccgccttctcaatggcgatgctcggcgccattgaatctctgctgtgcgcggtggtgcttgatggcatgaccggcaccaagcacaaagccaatagcgagctgattggccaggggctgggcaacattgtcgcgccgttcttcggcgggatcactgccaccgcggcgattgcccgctcggcggcgaacgtccgcgccggcgccacatcgccggttgccgccgtgatccacgccctgctggtgatcctggcgctgctgatcctcgccccactgctctcctggctgccgctgtcggcgatggccgccctgctgctgatggtggcatggaatatgagcgaggcgcataaagtcatcaatctgctgcgccacgcgccgaaggacgacatcgtggtgatgctgatgtgcatgtcgctaacggtgctgtttgacatggtgatcgctatcagcgtcgggatcgtgctggcttcgctgttgtttatgcgccgtatcgcacgcatgactcatctggcgccggtcaacgtcgaggtgccagacgatgtgctggtgctgcgggtaattgggccgctgttctttgccgccgccgaaggcttgttcaacgatctggagacccggatcgccggcaagcgcatcgtggtgctgaaatgggacgcggtgccggttctcgacgccggtggcctggatgccttccagcgctttgtgaacaagctgccggaaggctgtgaattgcgcgtatctaacctcgagtttcagccgctacgcacgctagcgcgcgccggcgtcaagccgctgcccggacgcctgagcttctaccccgatcgtcaggccgcgctggctgacctgtgatcacccggcggcaggtccctgcgcctgccgcatcaaggatccggtcgcctgctgcagccagctcagcaccgccggcgtcatccaggtgcccttcatcaaatgcggctcctgctccattgcccgacgaaacttctgcaacgtctgcggccgggtaccggcgtaggactgaaacagttcaagccacacccgggccagcgcctgacccgacgccgagtccggcgctacgccctcccggcacgcctgatgcagcttcgccaccagcgcaggccactcctgtagccggtcaaaatagtgctggcgggtgaacgccatctcttcttcgtcaaggtaccgcgcccagatggccagtttgctttcggcaaaggcctcggtgatataggcgatgattgccggcgtgacgccggtctgttcaaccatctgcggctcggcggcatgcatctcgttcaggcgggtcagaaactccggacgcccggccgtatcctgctccaggcgctccatccagcgcgtcgccagacgcatcgcctgcggactgtccgtcgggcagccgctcgccatcagcgtctgcacctcctccgttagctcgcgccacgcctgcgccctctgttcatcctgtgccgcaaacggcagcgcggctaactcctgttgactaaaccaacgatcgtacattttcattaactccagcgtctgtagccaggactccagatcgggttcattgccgctcgccagcgcctcgcgcagcaccaatagtcggtcgcgcagcctgccaacatcgcgtagctgggcgttgagcatatctatctgctgcgtcagcagctcgggcagcgacagcgtttgccgatcgagatagtccttgattgtggcgagcgttagcccggcctgcgccagcgcctttatcatatgcaggcgctgaaccgcggacaggttatagagccgatagcccgcctcgcttctggccgaaggcgttaacagccccgtctgttcataatgatgcagcgtacgtaccgtcagtccggcacgcttcgccagctctcccacctgaattaacatgactgctcctctctgtggccaggtccgctactctgcagcctgacgtaacgtcagggtcaagcaaaaaccgcgcttgctattcatttttgctggcaaccatagcagcacgaaggccaggacggaatgggggcgtaatatggcgggaaaaagaggaagagataaagtgagacacagaaaagcgcatcggccttcagcggccgatgcgcgaaatcatgctacggttagctgtgacgatgctggttacgacggcagcgtttatcgtagtggcgcacccaccagtagcggtcgctgacctgctcgtggccgccaatacgggcaccggccagccagagcactgcaccaacgaagatgcttaggattgcgccatgcgcaaagaattgtggcaggttaagctgcggaagctggttcagaatggagtaacctacccccacaaccatcaccaccaaccctaaccccatgagtacgttaccgagtaacgaagcgtttttgcgtttcatgtgtcacctccggactttgggttgccagggaatgtccccaaatcttataggtgtagtatagacaaggtctcttctgcggagtgcgtccacgatcacattagtgaacagcgaatagacaaaaatttacaaataagtctatgaaccatatcaaattctaatgatttagtgagtaaatcatcaatgcgggtattgtctaatagccagaattttgtcaagcgcgcccgcagacagtacactacgcggcagagaatgccccatgcaggatagaaaacgtgaccattaaactgattgtcggcctggccaaccccggtgcggaatatgccgccacccggcacaacgctggcgcctggtatgtggatttactggcggatcgccatcgtgcgccgctgcgcgaagagagcaaattcttcggctacacctcgcgcatcaacctggcgggcgaggacgtccgcctgctggtccccactacctttatgaacctcagcggtaaagccgtggccgcgatggcgaccttttatcgcatcaacccggatgaaattctggtcgctcatgacgagctggatttaccgccgggcgtggcgaaatttaagcttggcggtggccatggcggccacaatggcctgaaggatatcatcagtaagctcggcaataacccgaactttcaccgtttacgcgtcggaatcggccatccgggcgacaaaaacaaggttgtcggctttgtgcttggcaaaccaccggccagcgagcagaaactgatcgatgacgctgtcgacgaagcggcgcgctgtaccgaaatctggttaaaggacgggctgaccaaagcgaccaaccgtttgcacgcctttaaggcgcaataagccgttgtcgtgcggcatttttgccgcgcaccgtgtataataggcaaagctattcaattttctgcaatctgttccttgtaacagattgattatccaaagattaaggtgatttaaatcatgggattcaaatgcggtatcgtcggtttgcccaacgtcggcaaatccaccctgttcaatgcgctcaccaaagcgggtattgaagcggccaacttccccttctgtaccattgagccgaacaccggtgtcgtaccgatgcccgatccgcgtctggacaagctggctgaaatcgtcaaaccgcagcgcatcctgccgaccaccatggagttcgtggatatcgcgggcctggtgaaaggcgcgtccaaaggtgaaggtcttggcaaccagtttctgaccaacatccgtgaaaccgaagccatcggccatgtggttcgctgctttgaaaacgataatattattcacgtcgcggggaaagtgaacccggcggaagatatcgacgttatcaacaccgaactggcgctgtctgaccttgatacctgcgaacgcgcgattcaccgcgtctccaaaaaagccaaaggcggcgataaagacgcgaaggttgagctggccgcgctggaaaaatgcctgccgcagctggaaaatgccggtatgctgcgtgcgctggatctgaccaaagaagagaaagaggccatccgctatctgagcttcctgaccctgaagccgaccatgtacatcgcgaacgtcaatgaagacggtttcgagaacaacccgtacctcgatcaggttcgcgccatcgccgagcaggaagggtctgtggtggtgccggtgtgcgccgccgttgaagcggacatcgccgagctggacgatgaagagcgtgacgagttcatggctgagctgggcctcgaagagccgggcctgaaccgcgtgatccgcgccggttacgctctgctgaacctgcagacctacttcaccgcgggcgtgaaagaagttcgcgcatggaccatcccggtcggagcgaccgcgccgcaggcagccggtaagatccacaccgacttcgaaaaaggctttatccgcgcgcagaccatcgcttatgaagacttcattgcctacaaaggcgaacagggcgcgaaagaagccggtaaaatgcgtgctgaaggtaaagactacatcgtgaaagatggcgatgtgatgaacttcctgttcaacgtctaatcccgctggctggcgttttcgccgccaccgcgcaaaaaaaatccacgcagcggcgtggatttttttttacccaggcgacacgctactccacaatatgggtatcttctgccgcctcgtagccatcaacgatctgcacaattttctttaactcagcctcaataaaagccggggtggcgctttccccagaggccgggtgatgaagctccaccgagataccgctggcggcattggtcagcgacaggctgatctccagctggccccgcgaggacgaagaacgcccgatatgctgcatgatagccgtcgccgccgcgcgcgtatcaacgtctgcgagatgcccccatctcatttcaacatgcccctgctgtcctgcctttatcacctgcagcgtatagccgcttcttgccgttgccatgcctttttcctccgatttagttgcccgggcgtcgcattatcagcccggttttatcagccaggttcgcgcacctgtgccttgccgttaatgactcttttccacataggtctgcatgttttctttggtcactaactcaaacgggatccagacatgagactcgaccttttctcctttaatcagcttcagcgctaccgctaaggccgttttgccctgaccgacggcgtcctggaaaaccgtcacctgaatcttatcgctggccagggctttcagcccgtccggggtggcgtcgatcccgccgatcagcagcttcttctggcttttctccagcgccatcgccgcgccaatcgccatctcatcgttgttcgccgccacaatatcaatcgcttctccgttacccgtccagttctgcatcagatccattccctcgctgcgggaatagttggccggctgtttctgcaccactttcattgccggatacttggccaccacctgctccacatctttggtgcgctgcagcgcgccggcgtcggtgagattgccgatcatgatggcgacgttgcctttgtagtttgccagcttcgccagcgcctccatctgcaatgtgccagactcccgctcgtccgaaccgacaaacaccacgccgggcggtaacgttttatcccccggcgtccggttcacatacaccagcggcattttggcctgctgcgccatcttcgtcagctgcggggtgctggcggagtccaccgggtcgacgatgatcgcgtccacgccggaggcgatgaagctctgcacctgatcggcctggcgtccggtgtcgccgcgggcgtcttcaaactgtacgtcgacgtggcgggcttgagcttctttctcaatggactggcggataatagtgagaaagttttgatcgaagtaggccattgagacgccgatcttctctgctaatgccgaagcggaactggccagaaggcctactaacaggatgattttacagtgcttcatagtatgccctcagaaatcgaaataaaattttcaatacaactacaaacggtatatttaaatcattttcagactacgaagggcgttcggttcttgcaatattgatgtaaagaaaatgttgccatgcgcacactttatttcaccgcctcactcaccgagggctcaccggttgcggggagcgcagcggtcggcgacgccggctgttttcgcttcagcagggcatactccactatcagctgttgcagatgcagctccgcgaggcttccccgcgcggctggccagggttgatcaacgggaagcgcggccagctggcgcagctgctcctccagcggaacagcgcggttaaacgactgcgtgatggcaaatactgcggttttcagttcgctcaccgtcaggtacttccccttctgctcgtcgagggcattgagctggtcggcgagccgctgcagctgctgcatgccctccgaccagccggtaaggttttccgcgggcaatgcgccagcactcagctgctgccgccactgctgcgccagcggttgcgcctgatccggccagcggatcagggcctggtggaccagctggtcgccgtagctgaccgcccagtccggcgccaggcgggcaagctcgccaagctggcgctgcgtctgtggcagatcaaccggccccgggggcgttgtcgccggcaggcccggtatcggtccggcattttgggtgaccgaaatgggcggcaagtcggactgacgcagcgccagccatccgccgacggcgatacccgttaccgccagcatggtaaccatcccggcgataaacggcttccagcgcggcgcggctgccggagtagacgccgccaccggcgcgggccgctttgcaggtgaaggcggagccagcggctgagcctttggtctacgttttaggtctggcactggctcaaccttcgccgcatcctcttcgctgaccagagtgccgggaagttccgcgtcagacaccgccaccggcggcgcggtgggaagcgctggcgcagggtcgaggctctcgaagcgagttgccgtgctgtgcagtagcgcccgcaggtcgctcagctggttttcaggagcgatctcaaggcgctggagcactgcgtcgaagctttgcagcgaacgttcagcctgctcaagcgactcaacatcctctggggtaagattcagggtacggatcacctgccgcagccgcttgctcagggtgcggaagatctctgtccgggccgggagcgcctgtggccacaggtttttcccctgacgaaccagcagcgactccatcagcgtcagcccctcattgatccctgccaccccgcccagccgggcgcgggccagggtataccaggcgacagtctgcaggtccgcgccgtgatgctccaacagcccgcgggcaagctgctcggcatacggccagttaatatccggccgcgccgggtggctgagcttgttcatttccgcacgcagggccataaaatcagccagcgtgcgcgggtcgccaccggctttatagtgacggtcgtggtgtgttgtcatcatgatgtctttcagcgagagattagagggcggagcgggcgtcaaggtactgctgacgtttgaggtggcggatcaacaccctgccctcgggcataaactccgtgccgtaacgcaccaggccaatatccttcagctccgcatcaatggcatagcgcagttcgccgggcgcatgctgatcgagcatcaccaccgcgatccgctgcaggcgcggttcgtatttcagcaacaccgccgacaacgtgctcatcagctgatgcgccgacgctggcatcccctggaggacagcggtcatatccggcaggccgtagtccggcagatgcgccagcgttccggcccgacagttgaggatgcgctgcatgttatcgagcaccgacaggatgacctgatccgtttcgctgacagtattcaggtcaagcccgccggcgaaattgccgtacaggatgtcatacagggagggacgaggcattttcacttctccttaaacgggtgcagcgtcagttgattttggctggcttcgataatgcgcggcctcgccggatcaagttcgtcccgggtgagtaccagccgccagctgttttgcgtcaggtctggatcgataaacatggccgccaccgccacaaactgcgcgctggtttccatgggcatatcgacggtcaccgattcgcccggacgcaggcgaacatctttttccgccacccggtccgcctgcagcgcctggccatcgccggcaaacagcgacgggtagtcagtattgtcgaacgcttgccggtccttcagctgataaatacgcaccaccgtcgccagggaggcgcctttggcgttgttattcacgccttcccgggcgcgaagatccagatgcagggttttcacctgggggtaaaaaatggactgggtcacggaaacggcgccgtctttcacggtctgcgtcaggccgcagccggttaagacggtaaccatgaggaatgccagcaacctggcggagggtttaactgcggtaatcgccatcttcatcgctctccctgcggtggatattttcccggacgcgctgatagcgccccagataaatcgtgactctgtcgtcagcctgtttctgcgcatccagaggacgcagcacagcggtacggccgagctggacggcatgctcctgctggcagcaaagttgcgcatccggcagtaaatggcgggcgacgcaaagctgcagccgcacgtcaagatgagatccgagccagacgtgcagaagcgccatcaggtcgctgaacagttcgccgccgggcagccagccgcgaacctcatgaggcttttccgtggccagctgcagcaatacctgaccgttcacatccgtggcgtgggttcccatcactggcctatgttgcaggctaaccggctgacggacgctcatcgttaacggctgcgacaaggggatccggcagggatcgtggtggtacaccgtcgcccgggtccccggggccaggagcgccaccagcgcctccatgccttccccggatctccccggcagcatcatcaccggcagcagcgccagaaatcgcgacagcggcgctgcggcaacggcggcacatcccggtatgcccagccccgccaggccgagcagatactgcgagatgttgtccgtgccgcccgcccgaaaggttgccgggtaggaatatttgcgccagatacggtaatactgggcgatcagccgatggttaaagatatcgaggaaatcctcggtggcctcgacgccttcccgccgttgcgcaatgtcatcgctatagtgggtcggcagcggggattccacgccgtagagtcccataaaagtcacgcgaaccgccggcggacggggcggttcaggatcgtccattccacggatttcgccagccggaaagcccatccccggatgcgggcgaaagcgtatgggttcatcacctaatagccagccgctgccgatgatcggcgccttcggatggttcttctccagcaactggcagaagcggtaaaaattcatgtacggcaactgaggccggagctgcgccatcagccgggcaggcgcagactgtgattctctttccaccggatacatttcccttcaggttgaacaatgagcgtcagctggttgaactgattcatatcggcatacagtgcgaaaaagcggttgagcatgtcgccaaacaggtggacatcgcccgcaccggtaaatccgctaccgtcgagcgtcacttcgatatccagcccgcgcagcaggaagccctgctcgaaacgctgaattcggtgatggctgaccgccagaatggcgtccagacggcgattattgagctcatcctcccgccagttgtagagcgacagcgtgccgcgcagcacctcggcgctgctcatcatgttgagaaaacgggtgcccagatggctcatgacccgccagtggtagcggtcttccgccgggggataggccggcagcgtgggcctacagagattgcggacggtaagcggcgtggctgatatcgactcacagcgatccagcagcgtgctctgtagcgcccggcgcggcagctggccgttagtgccggtgatgcgcaaggagaccgtttcccgcgccagctcccggtcagcctcccattgctgtccgccgaggataagccaggtatcgtgcatgccggttacgccccgttttacgcgggtgtggtagtagcgctcaggagcatggcgacgcatcatcccgccctggtgacgaaagcgggtgaaaggcacatagcgcgcctccccggtgcgcccggagccggtcacgctgtcgacagaatagatttcggtatgcccgtcctgcaggcgcttcggacgcaggaggtattcgctctccagcccgctgatggtcaacggatcggcctcaagggtaaacaggttaatcaccggcacacagtgcaggcgcaggctgcttgcgctgacgggtaaatcactttgccagacctcgcggaacaccacctcaagcgtgaaatgcgatatccccgccggcagggtgatgttttccaggccatttagctgcacgaacataaatttttcgcgaaaggtgaaatactcgagcagcagctgatagccgctgaaagcgctctcccccttcggccataaacgatcctcctcgctgaatcccccggggaaaaatagccgtcgaggcttacccgctctgtctgacccggcagacgcaggtacagcgcggcctggcgtcgggtcagccacagatggagggcgctgccggtaacggcgtcttcccccaggtacagcgccaggcggcggagatcggtctgcgaccagtcagccagctcgctacaggcgaatcgtagtcgcagggccgaacgcccgtccggctccgccgtcatcatcgcctcatctatcgccagcgggttaagcgtcagatcgcgggtggttcggtaccggcacacggtatttttcggccccagtgggcgggagctaatctcaaacccggcgggcaccgtttccgctatcttcatcgccggcagcgttggggtcagcgccacgatcgataacgacggaatggtgcgcaaatagtgcggccacagcatgctgaccagcccctcggtcagctccggcagatcatcatcaattttttcgcgcaagcgacctacggaaaaggcaaagccttcaaacaggcgctcaacgtaagggtccggcgtaccggctttatcgagatccagcatcgccgcccgatcggggtgagcctgcgcgaacgcttttgccgcctcgcgcaggtagcgcatttcagcgtcaaaatatcgcagggttaaatcgtccattatgaatattccattattcgtctacagggagacacgcagcatggctgcgcggtcagattagttggccgtcgggcggccatgagcgaaggaggcctggcgttgcaggttaacgccaatcagtgagggagaaggttcagtatccctcttcgccgggtatatcgtcggtcagcggaacacgttcagcagacgcgcgcacgctgaatatcgtctccggtagcgtaaagtttcgcagcgccagcagcgccagcggtccttcccccgcctcggtacgcagcgtgtagttcagcaacagaccatccggcgctttccagctcaggctccagctgctgctcgttccgggataagcgctgaccaccgccttatccagcagacggatccacccccaggcgcccgggaaatcgccatactggcgggtgcccgcccgggtactgatccagctcagactggcgcccggcgcttcggtgtcagcgggccagctgaaccgccgccagaccggcatctggttcatatagacaagtttctgactgtcgattaccagctccgtctgcatcacgccgtccgccgtgccggggcgaagcgcaaaatgcaatcccgcttcgccgttggcgaacgcgacgtcggagagatggctcagggtattcatcgcctgcagaaaggccgggttaaacgtcagcccctgagcattgatactgtccgccatccagcggctcccctctttatgcagcacgccgttcagccgggtctgcagaaagcgggcgatgcgcccggtctcgctgttgaggtattttgccagcagcggcagagagacttcactgctggtatttttaaaggggtagcgaccgccaaaagcgctattccagtcctccaccactgcgctgcgccactgggcgttgaggctttccgccgccggggtcagcacctgctgccaggcctgttccatcgggcgaacaaacagcgtctgcccaaatccactccactcctggcccagccccgccgccaccaggctgccgtagtcgcgcgtttcggttaaatccacggccttgccctggaataccgtctgcgcaagcaaccgggtcatcgcctgcggatcggtggcgttggtgacctgctgcaggcgcagacgcacctgggtgacgcgggtcaggaaggtctgcaggctaagacggctggtgggtgtcccgccgtcgcgattgtccagcagcgccagtacgggcccgaaggtggcatccagaggaccgcgcgcgccggaccgttgatcgatgacgggcgagttatcacggttgaacagctgcctggccgatttgaccagcgaatcggcgatggcttccccggtctggccggttcgcccctgcacgctcagggtgttcatcagcgccaccagcggcgactggcgcacatcggccatcagggtcagctggtcgatagcatcggagagggtcgccgcgcgctgccagcgcagactgttgaggaaatccagccaggcgccgctgaaatcagcgaaataacgctccgccagcctggctcgcagagcttccggcgacgtcgactgcgcggcagtctgcttcgtatcgctcagcacccagtccatttcatcgcggcgttccgcgaccactttctcaatggccggctgcacggcctgctcccaggcctgacgggtaaacattcccggcaccacctcatcagtgctgaacagacgcgaagcatcggtgtcggcagtcatatccgccaggcgcatatcggcatactgattcgccacctgcgcgagcatcttctggtaaagcgtggactcactgttgcgctggcccagttggcgaattaaccgtgtgcgcacctggctgaccagaccgtcatcgacaggcagacgccactgcggatgcgatgccaggctggcggcataaaatgccagcagcgaagggccgctgccctgccagacggcgtcagcgatgcctgagcgctgcggccagtcctgcatcagcgtggtggcgaaccacgtagcgtccattttttccgggcggatcaacatcagatattgtttcagttgtccgtaagcggtcttcgtcatcttctcacgcagtgggctgtccggcggcagctgcacgaaggcggtgagctgctcttccagatgatgcgccgccgcatcgcgcagcagcggttgcgccatctccccgtagcgcggaaacagcgccgccagcaggtcatcattctggctgagaccagcgcggaggtaccacggcgctccgtgctgcgagcggtattccagttgagaaagcgttttctgtaacgcggagagcgcatgcaggcgtacggccagcggctgttttcccgccgaggcctgctgcacctgctcctgtgcgatcgccaccaggtggcggttggcgataaaagagactgtcattgaggcggcccagagtaacatcagggcggcagtggaggcagagacagctcttcgccagggaaagccgatctttcgtgcttttaagccggatggcctgagagattccagtagcacgtcccagcgtttatcgtggcgccaatgatgcttcaggctgtgcgacgcctgcggcgatgacgggctgaacacaacgccggctaacggtaacgcacgatgaggttccagaaacgtcgacaggggaacactaatccgctccggctgccgcgtgagttggtccgccaggcccagaagaaaatgatgctgcggattacccgtgagctgttgtactccagtctctaacagtcttgagggcaacgccgaaagtaactggcgcatctgcgacgactgacagtctggcgggaagagactgccgacagattgcacgatgcgcccggcctgatcatccgcctggggatgcagcgaccagacatacagtggtacagcccaccctagcagtgagaaacgttcagccagatcatgggcaatgttatctatatcctccatggacaacaaagcgggggatacgtgctgattggctgcgggcagatgatcaaacgcagaagtgacccacaccagcccattcacaggggggcaaaagcgtttacgcaaagcaaaaagccagtcattatccgacgcgctctggggttccccaccccaaagcaataatgtgtctccattctcctgccagtactggctactcaggcccggtgcaaggcgttcgacatccgccacgcttcccgtgagcatcagaatggtcattttgccagccccaaagcgaccatactggcgacgcaatgtctgcctcatctcaataactgcgcggtgactctgggaagccggcttcagatgctgaccacttgtcaatggcgccccctgccccttcagatggcggccgagtatgaactgcacaatacggccgccataacgaaaaagcagaataaggatccctaagcccaggcagaaatagagtttcgcttgcagcgtattcaatccaatcttgtcgccatagtgatatatcccccacaatattgcgccagctatcagcatcagcaccccaaaacggctacctaagcgcaatatgctatccgttgcattcatccttatttcctgcagtaagaagattcgagaaagattcagacccaccaccaggggctgatatgaccgtctgatgagatagtgtgtagtcacgaggcttgccgcctctcaggcagcgcgaacgggcctggcctggtgaagctctgatgatagtggtaatggggtgatcaccgtggcccataatggttggtcggcaaaaccgtcgccactcacaatgagttgagatttatcgtcaccgtaccgcacgattgctccagcgatcgcgacccagggggctgcgacgcctggataacccaggctactgtccaggttgtagaaatcacgaccgatattgatcgggctcgacaacgcgatcaatcccgttgcgatgggctgatgatagttcatcttgatacccaccaaccaaccggcaggcacggcctccgcgggtaacgcggcccagtcaaacgcgcgcgcaaaggcataatgaaacgcctcgtggcttatccccttcacctgctctggtcggtggagaagcgccagtggcataagatccgccgcgacctgaggactggcaagcaacaggctaaccaccgtttctgccgttccctcaacctgtttgggagcaacctgtagcgccacaatcagcatcagggatggctcagtcatcggctgatccagccagtggtctatcatctgcagccctttgccttccagatacgtcaccggttgccggatgtgactgttcgccaaacactggcgccaggtcgactgtatctcgctgacggacagactgccgtcgctctctatgattaatgacagcggtgtctctgcaggaacagatgccagtacagaagtcagctcattcaacgtattgctcatgatgcgcctaaccaactgttcgggcgtttcgtcgccgatacgcaacagccgactatgtcgtataccttcgtcactccaccaggaaggctgcgtttttaaagccggggtattgtttcgtaatgcctctcgctgccccttaccatcccgatcatccgggagacgtaatgcggtgtgtaagctcacgcccaggattgccaggtgacgccgccctctctggatttcacgactcaaaagctgttcacgatcgttatcccagccatcagccattgacagtaatcctttataccaggcgatacgcaacgccagcagaataagccagaataatgccggtaatatcaacgccgtttgccaaaaatccgcggtgtgtatttggagtttatctttattgctcataatggcccagcaggtgcccgctgccagccaacacagcaaaaacagcaaccaaacccaccacaccggtgctcgaggccgttgagcaggcgggggaatacgttttaaatcgacaggcatcgttagcgcaccctggcttgtggcaggctcgacagcaatatgcagccacaagcacaacggtggccatggaacgcaaccggtataccatgatcgctaaaagtggggtgcccttcggcaatcaccgtcggaccatggcctttgatcggacaactgacgggatcgcccagccgcgccacgccgataccaccaaatttcatattactggaaccacggagcactttcccgcccccggtatgcgtatcgcctgtacggataattcctttcataactttattaaccttgtagcatttaaggaaaataaatagctgcaatcattagcgaaattctttgcgcagccatttcctgagtttcagagttacaacatgcgagaaaatttctccagcttaagcagacttaaaagttcggaatcgtttagatggaaaatcagttcctccggcagacgacgatagaaatctggcaattcagtcaattgatagacgaaattattttcattgaattctttaatcctcatgagttcgggcatcaattccatcatcggcacatccgcagaataaccatgccgaactttagccagattactcatttttttgatgcagccttcacatccttcattaatgcctttttcccacaaatgataggcatctaatctcctgccttccatatcggcaagcaagccaagatgatcataagcctctgcataaccttgccctaccgcacattccagcaactgcttacctaatgggtgcagttcctgaaccctgacaacaatagttcctcctactgctgacatggcctgtggactgccacgcttgatggcttcagcatacaagtagtacattgtttcataatcgcgaccaaacaaatacgacgcatatttataggcagcaatagggatgccccgagaaacgagttcgtggagtttggtggaagcaacctctatcggagtctccgcactcggatattttattgcccagacactatttacatatgcggccttccagcttccggcttttattgctgttacaagcagtccttcacgtttttgcttatgttcaggactgttccagaaaccttttatttgatctccctcagaagtatactgaaccagttcactgaacgcctttgcagcactcttattttctttaggtgtaaatccagacgcgttatgacagacaaatttcatattctgaaaatacttcatcaatcccgggtcaggatttatttgcccagccgaatccacccacttcggcgaatgattaaaatcttctaaattagactgccccgttgctattcctgagaagaaaataaaaaatccgattaaaaatttacgcatatgatttgtccttaaatttataggtattaatgccagcgataactcgccgtaagaggagatttatgcctcgcccgtcagtcgccagagcacctgcctctctccccgcagccatttatcgccaagcgagcaggagcgcaggcggacaagatttaatttatccaacggtatgatgtctccctcgcggaagaaacggatggcacgttcgttcagtcctttacggagccgccacgctgtccttctcaaagtccggtgacgtcggcagcggtctgcccgttgccgggttcagctgtttcgctttcgccagtttctctatcagcactgcatcaggcgctggcggcgggatattggcctcccattcctccagccacttcagcttgccgtcccactccggcagcggcgccgggggcagcggcacgatatcgttaatttccgggacgacaggatgggcccatgagtatttcgccagcacagcacctatctgctcatagcgacgggcacgctccgggtctttctccagtgccagatagtacagcctgtcggtcggtgccgggcctgcaaatccatgttcaaggaaactggcggagcctgaatctcctgcggccacccctaactgatagacatctacagcgtcctgatatttctggtcaattgttagcataattcctaacgaattagccgcttttccctcaccttgtagggcagcgcatcgaaacatctgcatggctacctgaggagctcttttggccggaaatagtttttcgcctaaaaaagcctgcgcctggggattcccttcatctgccgccttacgatagtaacgcagcgccatctccgggtcctgcgccagccctgccgcaccgtgctccagatagatggcaataaagtagtagccggcggccaccttcgcatcaatcagttgctgactcaggcgcagacgttcatggctgctcagcgcaaagcgcccgcgcagcgcgccattctgcagattaatactggctttataatgaccgttttccgccgctatccggtacagacgggcaatctccgcatccaccgttttatcccggttaatcagattatttttttgccgccagcgggcgtatttaaacaggacatcggtatccgcagacgcctcaggaataatctggtgtttacaggtaaacgccaaacgggcattaatatcggtcagcgggttcaccggcacatccttgtggatacttttctggtcgcagcctgacagcagcaggctgcccagcactatccatgtcgttatccctttcattccctgacgctctccttttccttatcatctgcagagcttacgcctcgccgacccggcgccacaccgtctcctgcgcctccacgaccagtctgtcacgcagcggccagggacgtggccgaacgaaggtcaccttctccaccggcatgatgtccccctcgcggaagtaacggatggcatgttcgctcatcccttcacggggccgccacgccggctgccagtagccgctttgcgggcagggctcaccgctgcggcactgcagccgcgccacgctgtccttctcaaagtccggtgacgtcggcagcggcctgcccgtcgccgggttaagctgtttcgcctgcgccagtttctctatcagcgctgcgctgggttctggcggcgggatattggcctcccgttcctccagccacttcagcttgccgtcccattccggcagcggggccggcggcagcggcacgatatcgttgatttccgggacgacaggatgggcccatgagtatttcgccaggaccttgactatctgctcataacgacgggcacgctcgggatccttttccaatgccagatagaacagcctgtccgttggttcaggtccggagaatccgtgcatcaggaaaccggctgaggttgaatctcctgctgcaacgcccagttggaaaacctcaactgcctccggatattttttgtaaattgcaagcatatttcctaacgaattagctgctttcccttccccctgttcagcggcacattgaaacatctgcatggccacttgtggtgccattttggccggaaacagtttttcaccaacataagcctgggcctggggattcccttcatctgccgccttacgatagtagcgcagcgccatctctggatccttcgccagtcctgccgcaccgtgctccagatagatggcaataaagtagtagccggcggcaaccttcgcatcaatcagttgttggctcagacgcaaaagttcagtgctgctcagcgaaaaacgcccgcgcagcgcaccgttctgcaggttaatactggctttgtaatgcccgttttccgccgcgatgcgatacagtcgcgcaatttccgcatccaccattttatcccggttaatcaggttatttttctgccaccagcgggcatatttaaacagaacatctgtatcagcagatgcctcaggaataatctgatgtttacaggtaaacgccaggcgggcattaatatcggtcagcgggttcaccggcacatccttgtggatgcttttctggtcacagcctgacagcagcaggctgcccagcactatccatgtcgttatccctttcattccctgacgctctccttttccttatcttctgcagagcttatgcctcgccgacacggcgccacaccgtctcctgcgcttccacgaccagtctgtcgcgcagcggccagggacgtgggcgaacgaaggtcaccttctccaccggcatgatgtctccctcgcggaaataacggatggcatgttcgctcattccttcacggggccgccacgccggctgccagtagccgctttgcgggcagggctcaccgctgcggcactgcagccgcgccacgctgtccttctcaaagtccggtgacgtcggcagcggcctgcccgtcgccgggttcagctgtttcgctttcgccagtttctctatcagcgctgcatcaggcactggcggcgggatatttgcctcccattcctccagccacttcagcttgccgtcccattccggcagcggggccggcggcagcggcacgatatcgttgatttccgggacgacaggatgggcccatgagtatttcgccagcacagcacctatctgctcataacgacgggcacgctccgggtctttctccagtgccagatagaacaacctgtccattggttcaggtccggaaaatccgtgcatcaggaaaccggctgaggttgaatctcccgctgccacacccaactggaatgcctcagttgcctgctgaaatcgcttattatttttcaggttaacacccagatcactggatacctctctctctccctgttcagcagcacagcgacgcatctgacgggatatatccggcgcaatatcaatcggagcgagtttatcccccacatacgcctgcgcctggggattcccttcatctgccgccttacgatagtaacgcagcgccatctccgggtcctgcgccagtcctgccgcaccgtgctccagatagatggcaataaagtagtagccggcggccaccttcgcatcaatcagttgctgactcaggcgcagacgttcatggctgctcagcgcaaagcgcccgcgcagcgcgccattctgcagattaatactggctttataatgaccgttttccgccgctatccggtacagacgggcaatctccgcatccaccgttttatcccggttaatcagattatttttttgccgccagcgggcgtatttaaacaggacatcagtatcagcagacgcctcaggaataatctggtgtttacaggtaaacgccaggcgggtatgaatatcggtcagcgggttcatcggcgcgtccttgtgggtattgttctggtcacaggcggtcagtaccatgcagaataaaagtaagagtcgtttcatcaatccagatcgctcagcgttgatttgttgtaaaaaaatttaatcagcgatgctacgggtttgttctttttagtgccttgtaaatctttattttctttcagaatataaccccattcctcaaatgccttcgctggatcatcctgcccccctcgtccgttagtatgcatattccataaccgccgtcgtaaatcccgcgtcacgctggcccattcatgggcaatattcatttcactgtccacccgcatactgcgcgtgttgatattcgctgaaccgtgggtggtaaatacatcattcacaatcatcagcttcgagtgaatatataccggcacccattcctccggtggtgagtccggagccaccagcgagcagatatgaaccttcagtccggggcgttcctccggcaggatttcactgctctgaatttcatcggccttctttttaaaatcagcaagtttctcactcatctcgcgattacgtttattgatatctccggggtcgatataaccaacagaaccaccgaacgttgcgttgctgagttgtccgatcttacgcagtttagtcacttcagggataatgtttgctcgacccagcacctcaagcatccgctgggtattcaccgtacccgccccaatgccttcatcggttacgttagtcacaacaaacaaatgcagttcgcgtcccactttactctgtctttccgcaacctgattaattaactctgccagcggcggccagcgaaaatactgattttcgatatagataaactgcgtcgcattatttacggcctgcagataaagcgtttcaatatcatgctttcctgcctgcgcctgagtgcgcaacagttgcgccatcaccggcgtaccgtgtagcgcacgcagtttcagctttttcgcgatggacacgctatcacgaatagtcagcagatcctgaccggtttccttctcccacgccatggcaaaattatgatgcagatgctccagaatcgggccggttacccgactggagatatcctgccgcggcagcttaccgttagcgcctaagcggggatccatattattgcccgggcgaaacagtgcagaatgtttatccgtatcccagtactcatcaagcatgttgtgacccataacaaaaccaaccgcagactccggcagttcgtagtcaaccagcaccgttttttgatgatgggtcacggtacctgcaagagtaagcatcgtgtcagggctgatatccggatcaagcgccatattcgcagcgcgataggcaatttcagctctctccaggaaattaaacccgcgcccgacaaacaaaggagaaagtgagcttaatttctcttgtcgttgcgctatgggtgcggcagcaatttccgctatcccggcctgtcccttttttaactgatgatcggaccattcccctgacagagaatactgactgaaccattgtcggtcataggcataacgttcatccgtagtactctggcctttccggtccttataacgaatgactcccttacccggtaaattggcctctcctcccacacctgcggcattacagggcatttcccagcccagaatacgcacctggactttttttgtttccgcaatcttgcaaagtaattcgccgatacacagcgactgaccatcacggataaagtacatcgaaggctgaaatccccagcaaataatatccaccgttttctgtgcattcatgatggcatgataaacggcagcaaacgcttcttccccgtttaccagcggcttataggtcgccggcatcggtgagtattctgtattctgcacaaaccagggagaggtgatcatacattgacgggtgtcaaccgtggcaatcggggtaataatgtcttcctgagtcattatattttatccttttaagtgagacttttgccattcagcgaggaaattaccgtcgtggcagtctccttatttttatctttccgttataagttttggtttcagcgtctttattgcaggactttctttctgtttgtgatggttcagggaccgggcaggaaaaaacgctttttactggccagctgacctgttgtatttcccggagtccggtgacgtcggcagcggcctgcccgtcgccgggttcagttgtttcgctttcgcaagtttctctatcagcgctgcgctgggcttcggcggcggcacattggcctcgcgctcttccagccatttcagtttgccgtcccactcagggagcagcgcgggtggtagcgggacgatatcattgatttccgggaccgtggggctggcgtaggaataattgctcaggatcttcgctatctgtttatagcgcctggcacgttccggatccttctgctgagccagataatagagcctgtctccaggttcaggaccactaaatccatttgctaaaaacctcgctgaactcccgttacccgcagcgactcccaactggaaggcttctattgcactctgataatcctctttaccttgtaaattaatacccagcattgccgccgccttcccctctccctgctccgcggcgcaacgacgcatctggtgcgcaatattgggcgccctgtccaccggcgccagcttatcccccacatatgcctgcgcctgcggattgccctcatccgccgccttacggtaatatcgcagggcaagcgccggatcctgctgcagccccgcgacgccccgttccagatagatagcggtcagatagtacccggtcgccaccccggcagcgataagctgctggctcagccggaactgctcatggctgctcagcgaaaactgccagcgcagggcgccgttctgcagattaatgctggccttatagtgcccgttctctgccgctatccggtacagccgttcggtttgcgcatcgacgctcttgtcctgcttcagcaggttatttttctgcagccagcgggcgtatttaaacagaacatcggtatccgcggagggcgcgggaagtgtctcatgctgacaggtaaacgccggagaggaacttatatcgctcagcgggtctgtatctgaagatgcctccatgtggacactcttctgatcacagcctgacagcagcaggctgcccagcactatccatgtcgttatccctttcattccctgacgctctccttttcctcatcatctgcagagcttatgcctcgctgacccggcgccacaccgtctcctgcgcctccacgaccagtctgtcacgcagcggccagggacgtggccgaacgaaggtcaccttctccaccggcatgatgtccccctcgcggaagtaacggatggcatgttcgctcatcccttcacggggccgccacgccggctgccagtagccgctttgcgggcagggctcaccgctgcggcactgcagccgcgccacgctgtccttctcaaagtccggtgacgtcggcagcggcctgcccgtcgccgggttcagctgtttcgctttcgccagtttctctatcagcgctgcatcaggcactggcggcgggatatttgcctcccattcctccagccacttcagcttgccgtcccattccggcagcggggccggcggcagcggcacgatatcgttgatttccggaaccgtggggctggcgtaggaataattgctcaggatcttcgttatcagtttatagcgccgggcacgttccggatccttctgctgagccagataataaagttcatctgaagattcggggccatcaaacccatgacttaaagcaagcgctgaggaagtgtctccagccgccacacctaactggaaagcttcaattgctctccgataataaccttttccctgtaagttaacccccagcattaccgccgcctttccctctccctgttccgcggcgcaacgacgcatctggtgtgcaatatcgggcgccctgtccaccggcgccagcttatcccccacatatgcctgcgcctgcggattgccctcatccgccgccttgcggtaatagcgcagggcaagcgccggatcctgctgcagccccgcgacgccccgttccagatagatagcggtcagatagtacccggtcgccaccccggcagcgataagctgctggctcagccggaactgctcatggctgctcagcgaaaactgcccgcgcagggcgccgttctgcagagtaatgctggccttatagtgcccgttctcagccgctatccggtacagccgttcggtttgcgcatcgacgcttttatcctgcttcagcaggttatttttctgcagccagcgggcgtatttaaacaggacatcggtatcagcagacgcctcaggaattatctgatgtgcgcaggtaaacgccagggcggcgtgagtatcggaaagaggattcacaaataagtcctttttagcagacgatgcgctgtgcaggagacatgccatcagcgacaggaataatattaactggcgcatcaatccagatccttgagttcgttgttggcataataaaaagcaatcagcggggcaataggcttctgatggttttgctggcgttctttatttttactaataatatattcccatgcatcaaatgcatcagaagcattgtcctgcacgcctttcccactggtatgcaacccccacagccgtcgtcttaaatcccgggtcacactgccccactcatgtgcaatattcatttcactgtccacctgcatactgcgggtattaatattcgccgaaccatgtgttgtgaaaacgtcattaacgatcatcagcttggagtggatataaactggcacccagttatccacgggagagtcctgagccaccagtgagcagatatgtattttcaggccgggtattggtaccattggaatatcgctatcttttaactcttctgcttgttttagctgtgcttcatattctttctgccggcggataaactcttcattaatctgcgcctgggtggccggattgcgggaccaggcgagagaggcgaatttgcctgggtcttcctccctgatcttctctatcattcgggcccgggtcacgcctggaatcgtattggcgcgccccaggctttccagcatacgctgggtatttaccgtacccgccccaatccccccttccgtgacattggtgataacaaataaatgtaacgatccgtctttttctggcgttcgtcctttatcaatctgcaagtgcgccgctttttttataacttccgccaacggtggccaacgaaagtactggttctcaatatagataaactgcgtgctattgttgactgcctgcagatagagtttttcgatatcacgtttattttcctgcgactgcgtgcgcaggaactgggcaagtatcagggtaccacactctttccgcggtttaaggcgtttcgccatctcacgggcctgacgctttttgataaggtcctccccggtttccttacgccatgctttggcaaaattttcgtgcagatgttcaagaatgggtcccgtcacctgactggaaatatcctgccggggtaaaaagccgcgagcgccttgatcaggtccccagggggccgggcccccgaaccgattctgggaagagtgcgcatcggtatcccaatactcatcgagcatattatgtcccatgacaaaaccgatggcgctttcaggtaattcataatccaccagcaccgttttctgatggtgggacggcgctagcgtcattatccccaccgcgctggcactgagccctttatcgagagcctgatatctcgcccgccaggcgatttccgcacgttctactttattaaacccgcggcccacaaataggggattgacagtccactgattgaactgcttattgattgtgctggctaaaaagttgctggaatccagcagatcgtcactatatgaatgacgggtaaaccaatcgcggtcaaaagcatattgttcgtctgtcgcactctgcccggcgcgatcctgaagatgcaggatcccctttccgggaaggtttgcctcgccgacaaccccggcggtattaaagggcgcctcccaccccagtatacgcacctgaacctgtttttccgcaagcagacagagcaattccccgatgcgcagcgcctgtccgtcacgaataaaatacatggatggttgaaacccccagcagataatatccaccgatttttgtgccttttcgatggctcgatataccgccgcaaaggcctcctcgccgtttaccagcggcttatacgttgccactgccggtgggtattccgtattctgaacaaaccagggcgaggtgatcatacattggctggtatcaaccgtagcaaccggggtaacaatatcattgtgactcattgactttcgtcctgttcaatatggccatcgagcaaatccgcgtaagtattacggtgctccgtatgtgaggagggggggttaatatcagatgcagcctgcgaggtatggtggtgaaagccgcgattagcgagttccccctgctcagggcgactgtacgcttcggcaacgggtatctgatagctgacgccattagccatctccagcttgtaacttctggtcacgacctggtgatcgactgatatctgacctctttcatccagcaccccttgtttcaacaatgcgccatcggcatacagggtatatggcattccggcccagctgctgtccgacgcatttggcgactgtgccacgttcagtttcagcgattgccttacggtggactgaagtggcggataatccggatgatcggccttcatgctggcgggtccgctataggaaaaatccgcggctttgacgtcgacatcaccgccagtaccgagctcaatccgatagggatcgagggtgatatagcttcctccagcgttaatgatgatttttttctttgccacaatgtgaatttcgctatcagtactgacaatctccagatccttgcgcgccaggagctgcaactgatcgttttgcgcctgaatcgccacgggcccctgattggcgattaatttcatccccagcttgcggacaaacaggctcagcccttcccccacaccaataaacagccgtttcataacgcccatatcggcatctgccccggcattgagcatcagattgcgacgtgcggttagttgcagatgcttgccactggcgagagccacaccatttggtgcgctgagcacggcaaccgcctcccgtagctgatcaatttgctcacgcataaaagctaactgttgttcaacctgggctgggtcggctttagccgactgggcatcacgcgatagcgagtccatctcatcacctgcctgcttaagcctgtccagggtatcctgcattgcaagtatcttgccgctggcggttgactgtttatctgcggtgataaagatccctttccccgcccgtatcgccccccatttatccgtccggagctcaaacccctcgccccgcaactccctttgcgcattcacgttatgccccaggttcagctgcgtcttgccgccgtactcggtgctgagcttgatatgctcctcgccgcgcttatcctccattcgcagcttattgttggccggagtacgaatcacattgcgggtgctgtttttctccgtcacaggatcgacatgccgcgagtcgtgcagcgcatgcgcaatatacggccggtcagggtcgccttcgtggaaagcaatcgccacctccgtgccctggatcagcgggaagtgaaagccgtacacgtcgccgccgtagggtttggcgagacgcaccggcatgctttcctgaccctgccctttatcctctctgtcagcgtcaaatttcacccggtacaggccggacgcatcctgccaggcgtagatatcattcgctttcgcgctggtcacccgcgccgtcatggtgccagtcaccttcgggcgcggcagcagcggcggacgccagcacaatgtttcgctgtagggcaccgccagcagggacacccgcagcgcctcccggcggctggcggtaaaaccggtgccggtgattaacagcggatcctgtacgggcgcaggcagggtcgacggcaggctgtcggtaacggtcagcacctgggccggcgccagccaggctgcagtactgctcgcggtaataagcgtctggtgagccagaaaacgctcatggtcgaggcgggcataaaagttggcggtctccgtctgcggctcgattttatcgccacgctcccggtggcgaagcttatagtggtatacctcaccgtaagtgatgccttcaccatttccccgggtcatatccgctgttgccgactggagaacgctctgcgcatcgcgggggttataatcccgggtagtgacgttcgcctctacgacgttgtgcgtgatgttcagaccccaaatcgattccgtaccgctgtcgctcatcccggacgggctgtttacaggaagtgttttatcgaacatcagcgcccgctgcgcgtcggcgaagtgaaccacttcgctctgcgcctcttcctgcagggtgaagaaataaaatatccccacctctgccagcaggcgctggataaatgccaggtcgctctcctgatactgattaatttgctcgcgccgcggatagtgttgcttgagattaaactcatactcccagtcatgcaggtgatgttcctgcaatacctgctccaccacctccggcaccgatttgttgacgaaaaaacggtggctgcgaaactgtttatccagcagggagagaaacggctggagggttatctgataggtcgactgatcttcagaacgattgacgcgccggaaggtggtaatcacaccatggacgcgtttgcagtccgccaactgctgcagtgcgccgccgcccatcgtcagcatggcgggtttgctcaggagctgtgcggcatcaatatttttctctgcgctggtaaacgtaatagtgtaataataaagttcactcagtttttctgccccactgaattcttccacatccagcgatgcggtacatgaaggaatacccagctggtaacggttaagggtggtgccggtaattattgaagaggtatccattatattcctgttttactccgctgtaatgactatcaaaaatcaattcacaggacgccctgtttaattttgtttaatgacaatcatctcattcatcataaatatatttatgtgcatatcgatatatcagataccccaccaggagtttcgtaactaaaaggtaaccccagggatatttatattcactgactgagaaataaaaaaagcagccagaaaccggagccttcaacgtttatcgccgccagcatttctctggcactgtctttagcgctatccatactgatctcctttatccatcccctttcccgagcttcatccccgcagaggcttcgcttagccgacaagattgactggctgcaggcacgctaccgcccatcgctgtttcctgtttatcagggacccgtagcgcacagggtcaggcaggcagattgttgttcaacctccgcgatcggggtcgctgattactcggtttcgctttttaatccgttagtctctgctcctgaggtattggccgtgcccggcgtcagacaggcgtccttctgcgggaccagactgatctccacccggcgattttgcgcccgtccctctggcgtctcgttgctggcgacaggacggcttgcgccgtagccctgcaccgcaaaacagctctccggcacatcgccggtatcgcgcatccagtcgcggaccgcctcggcacgcttcagggagagttgttgattggatctatcgttgccgatgctgtcggtatggcctgccaccacgatcagccagccgggtttggccttaatgcccagcagcgagttcaccagcagctttgtcgaacccggtttcagcgccgatttgccggtatcgaacagcgccatgctatcgaggcggatcgtctgcggcccctgcacaacctgcttaatgaccggacgcggcggcgggggcggcgcccagtcattgatagcggcttcaacgaaggggatcagccgccccccctgatacagccccagccgataacgcagcggctccccccggcgcaaccagtcatccagcaggcggctgtcggcacgcagacgctgctgcgcctgcagcttcggcgtcggcggcgtgccgctgaggcggtgatacaccgccagatgatcgccgacgctgcgcaccaggcgctggttgttgataaaggaagccagcatcgccagcgccagaaagaggaagcccaccccagcggcaagaccggcatcgcgcatccggcggctgaccccgtggcggtgcggcagtgacgacagaagaagatccggcagcgggtgaggacctggcgccgcgtcgttgcccggggagagcgtggtgatcccggcgatttgctgttgccagaggttattcgccaccgccgccaccggcgtaaggcagatgcccgcggcacacaggttcagcggaggaagttctgcctgccgggcgcggaatggccggaaaagagcgttttcggccaaggtcagaatgctctccagccacagcgtctgatgcaggcgtgaggcagagctgccctcccgctgccacccggcaaccgactggggcgcttgtcccttctgctgcacctggagaccagccctctccggcgtgatggtaaaccagcggctttccgcggcctggccgcctggcggcgtcacccagaacacgctccacacaggcggcagaccgtttagccaggttcggcactgaacgatactccgccgccagtcgcgcagcgactgcgccagatgctccccggaggggtggtgctccggtaccaccgccagcagcacggaaacctgcgataccagcgccggacgcgccgccgccaggtactgcgccagccgcggcaactgctccgcgctgtcaccccggagataccagccgtgacgggtttcgccgtgcgccgaacgcccgggaaacagaccgtcggtatccccgcagaccagaaccaccgccccctgaaaatcctcgggcggcaggacgatttccgatcgctgacggctgactgcccggcgacgctgacgccagagcgccgcgccgcccgccagcaggatgcacagactgaagatcacctggttgccgatggacagcggccagaagcccagcaccagccacagggccaggatgacggtcagtatcgtaagcagacgacgggcgttatcacgcatctcttatccctgccctgctatctgcgccaccatctgtgacagcacggaggagaaggtcaaccacagcgccgccagcgccacaatgccagccgcccagccgcaccagtacatccgccgtccgctgcgcagccgggaggcacgaaccaccaccggcgcctcctgggtcatgctgaacggcgggacccgcgcgccaagcgcttgcgccacgtcctcacgccgttcgtcatcctcggcgcggtactgtccgacaaatcccagctgtaaagtacgaaagaagcaggtcagcactgccgcatccgccgtgggctctcgcagcagctggcggatccgttcccagagctcttccccggcgttgagagtgctgaaaaagcgcgcctgcagcggatccttgcgccacctgcggtagccatcatcctgactggcgcggttgaggacgctctcatcgagcagcgcgcagtaggcatagagcatctgctcagcgctggcttcactgactccccccgccgtcagcgcctcgcgcgcctcggtcacccatcgacaggcctggcgatagagcgcctcgccatccgtcaccggctggccgcagcgtaactggctgaccatcagccagcccgggtaaaaagttttgttgatcagatcgctttcagagctattcatgagcgcagtaccgcaaagagttcaagtttcacgtcgccaagcgattccggggtatagaaggtgcagttgccggcctccagcatcgcgcgggcggcatcggtggagagatccagagcgaaatattggttttccagacgtagcggaatggccgccggcacatggctcagcggtttgatcgcgatgccgctgagggcaatattgacgacctcggcgacatcatcatggctacccgccttacagagctgcggaaagcggctctgtagctggtgaggggggagtgaagagcgcaccgacagataaaaatccgccccctcgcgcagccgcgcatcgtgtagcctgccccgccagatctcccggtcggcgccctgctccagagcgatggcgatcacccttgagggcaggctgacttcgagcagcatatccagcagggcaaacagcggcgggaatacctgctctggcgaggcatgtcggtagcgggggattgcttccagatgatgttcaagggagaaagtcagcagactgccggccagcctggccagttcgcgatagagcagctccggatggcgcgaagggtcctgatgcagctcgctgagcaccggttcagcgctgttcagcgcgttgagcagccagaacagggaaacatccgccacggcaaaatcagccatccgcgcattgctttcacgacgcatggccatcaggcgtctgcgtcgggcctgcaggcgatgtaacagctcgcccagctcgctaaccagcgtcgggcttgccgccagcgacagcagcggcgggatgaattccgggtcaacgatccactgcccctgggcgtcgcgcaccagacgcgctaccgggcaggtgaggaaggctgcattttcctcggtggagagacgcagcgttagcgcgtgccgcagaacggccagctcgctgcgttcatggccggccagctcctggacggtcacctgctcggcgcgccagcggcgcgggcgggcgctctcctggccgtcatcaagattgccgccgctggcgctgagcagcggcagagcgagcagaacctccacgctgtcctgcatcacgtccgatacatcgcggaccggtggcaaaatatccgccagctcggtgtcaatcagcgttccgtcggcgaaacgcacgatcagccgggtagcgttgagccgggaaagggtgagcgcgctcacgtcaaactccgcgcgcaataccccccacgggtgggcgagcgccatgcgggagaccgtatcggcgacgtgcgcgtcccagcgggcctgttgctgaaactgctgcgggaccagaaaagccccgtcgcgccataatgggcggaaaatcttcattgcacctcctgtgcctttcactttcattggtctgcagacaggaccaaatgcccggacggatatccctcatccgccgtgtgttcggctggatttattacctgccgcttcagggaaaggaaatatctcccctgcccgcgagagtttcgaagtcagatgatattttttggtcaagggatgtttatcataaagcgaaagagtcagggggaggtaacgcctggccctaaataatatctgaattcaacccaaggtagctttattgctctcggtcatcacatgtagaaggaatattccataagcgacccttttattattttcctgttgaatattaattagcgaattaatccctccgtcaggaatatttnnnnnnnnnnnnnnnnnnnnnnnnnnnnnnnnnnnnnnnnnnnnnnnnnnnnnnnnnnnnnnnnnnnnnnnngaatctcccccggcaactgccagatacccggaggagtgccccgcccccacccggccattgccaggcgctgcattaccccgtattttggtttcccgctccgctgtgggcgggtatcagggcgaacgagagagagaaaatgaaaccactatttgtctatgggacgctctgtcccggtcgcagcaatgcgcatattctggaggcgatcgggggcgagtggcgtcccggctacgtcaccggcaccttttacgcgcgcggctggggcgcagccgccgatttcccggggatcgtcctcgacgctcacggcccacgggtcaacggctatctgttcctgtccgatcggctggcggcgcactggcccatgctggacgactttgaggaagggtacgatcgggtgccggtggaagtgaccaccgacgatggacagcagatcagcgcctggatttatcagcttcagccccgggggtaatcccccgccgcgctgcgcggcatggtacagcagcccagcgcgatcgcgagtctggcgtcgtttctgccaatgcaggtatacttgccagatgtttcctcagtttcagacacgcagatgacaaaactcaccttacaagagcagatgctcaaagccggcctggtcagcagcaaaaaaatggctaaagtccagagaacggcgaaaaaatcccgcgttcaggcccgtgaggcccgggaagcggtggaagaaaataaaaaagcccagctggagcgtgataaacagcttagcgagcagcaaaagcaggcggtgctggcgaaagagtataaagcccaggtgaagcagctgatcgagatgaaccgcattacggtcgcccggggcgatatcggctttaactttaccgataataatctgatcaaaaaaatcatggtcgacaagcccacccagacccagctgattaacggccgtctggcgattgcccgcctggcggtggataacaagcccgaaggtgaatatgcgattattccggcggtagtggctgagaaaattgcccagcgcgacgccagcagcatcgtgttgcacagcgccctgagtcaggatgagcaggatgaagacgatccgtacgccgactttaaggtgcccgacgatctgatgtggtaaccccgggctttcccgccgcgggcgatcaaaacgggctcgcctgctggatatgcatcggctcatggctgacggggtggacaaaacgcagttcgctggcgtgcagcatcagccgcggagcgcattccgtgccgggcagctcccggccaccgtacagatcgcagccaaggatcggatagcccagcagctggcagtgaatacgcagctgatgggtccgtccggtctccggggtgagcgtcacccgggttaacgccagcgccctctcgccttctcgcgcctgatacaggcggtctatgacccgatagcgcgaacgcgccggtttgccgtggcgggcgcagagcgccatgcgcgggaaacgggccggatctttggcgattgccgcctccactatcccctcgtcttccgccaggtggccgctcagcagcgccgtatagaccttgtccaccgtgcgctggctgaactgttggcacagcaaggcgttaatgcccttgttgcgggcgatcaccatcaggccggaggtgccgaagtccaggcggtgcaccagggtgcagcccggaaagcgctgaaccagccggtgatgcacggagtcgaggttgcgcggatctttgcccgacaggctcagcagcccggcgggcttattgatcagcaccaggtgttcgtcctgatacaagagggtgatctgttcgcggcacggcggcgcgacaaaggtatcgataatggtggacatcaggcggcccgaagaaggagtggctggcgatagtaccccattttgcccagcggcacgatgctggcgcacaatccgccctcgcggcggcgtcatttatcacccacacttatcgcaaaggcatggcctgtacaggcaatgtgctttacactgcgcgctgcaaaatttgtgttaaccaacgagtaatacggtaatggcgatgaacggaacaatcacaacgtggtttaaagataaaggttttggatttatcaaagatgaaaacggcgaaaatcgttattttcacgtgattaaggtcgccaatcctgatcttatcaagaaagacgcggcggtgactttcgaacctaccaccaacaataaagggctgtcggcctacgcggtgaaggtcattccggaaagcaaatatatctatattgccggcgagcggttgaagctgacctccatcaaatcctatgtggtgtaccgggaagaagagccggtcgagacccgcgtcgataaagaaaacgccgtgctgtcggtcgggctgctgatgaacagcatccggccaaaagccacggtgcagccgggagagatgcgctcggtgaaaaagctggcgatcaccacctttcaggggacaaccctgatcttttcggaagacgaaatcgatatcgatgccacggtaaaactgcttaaggtgtaagccctggcgcgcggtttcccgcacgcccgaagtcctgcccgatatgctacccgccatcgcccctcgccggacggggcgatggcgccagagagccgataaggatgccgccatgcccgtaaattttgacttcaacgatctctacgcctttcgcgccctgatggaatatggcagttttcggctggcggccgaatccatctgcctgtcgcagtcggcccttagccgacgcatcgaaaagctggagacggcgctgggcaaccggctgttcgatcgcaccacccggcgggtgaccctcacgctgtatgggcaaaattttgccgaacgttcggagcagctgctggcccatgtcgagacggtgctggcggatatcagccaggtcagcaaggcgcgcaccgggctggtgacggtggcgacggtgccttccgccgcctactactttatgccggaaatcatccgcagctttcaggcgcgttatccccaggtgcgcatccggttgattgacagcagcgtcgggaatgtgatcgaggcggtcagcagcggacaggctgactttggcctctgctttgccaaaaacctgccagccagtatcgaattcacccctcttgccgacgaccgctatgtggccgcctgtcggcacgatcatccgctggcgcgcaagacgcacctaagctggcaggcgtattttgaacaggattatattggcctggatcgggtctccggcaaccggacgctgcttgaccgggagctggcgcatctgacgccggcgcggccaagtatctgcgaaacccgccacgtcaccacgatgctggggatggtggaagcgggcatcggcattgccgccgtgcccgcgatgtcgatgcccgccggggagcattccgttctccgcgctgtgccgctcaccgacccggtggtcacgcgtacggtaggcctgatccgcctcagcggccgtattcagtcctacgtggcggcagagctggagaagctgattattgaacagtatccttctggctgaccggcgcggcggcggccacgcttcgcataccggtggcgtggatggtctcctgcgccgccggtgacgccagatacgtcagcagcgccttgccttcctgcgggtggtcggcgctgatggtcaccgccccggcaaagcgggtgatgtactgcaggttatccggcagttcgccgacgaaggttacgccgggcaccggcagcagttcgctcacctgctgaaaaccgatcgcataccgtcccttggccacttccgaggccaccggaatgcgctccaccatctgcgctttactctgcatcgcgtcatcaatgcccagggtgtggaacagcgtcgagctgacatagcgtccgctggcgctgtcggagtacgcgaccgatggcgccgccagcagcgtcgcccgcagctggtctgcgctgtggatagccggcagcggcgcccccgccttcaccaccacgccgatcggcgagtcggccagctcccggcgcgaatccggttgcgtacggcccgctttctcgaggctggtcagcgcgtccccgaccatgatcaccacgtccgcgtgttcgccgcgcgccagacggttagggatcgcctgcggcgtttttcccatcgacgggccagggatcaccacgaggtggttgccggtttgtttttcccacgccggggccagcttttccagcgccgctttgaagccgccggagatcatcacggtgacctcagcggacaacgcgctgccgccggtggcggccagcagcagcgtggccagcagggttcctgtcgttttacgcatcatcttctccctgattaacgtgccgtctgcagcgcaacggcgctacggcgatagaggtagcaagtggccagcaggccgcagatggcggcaaagctcatccagtagccgggagacgctttatcaccggtatactcaatcagcgctgtggaaatcaccggcgtgaagccgccaaacaccgcggtcgccaggctgtaggccagcgagaaacctgccacgcgcacttcggcgggcataatttcggtcagcgccgggatcatcgccccgttgtacatgccgtagataaacgacagccacagcagcacgctcagcatcatcaaaaagctcggggcgttcgccagcatggtcagcgcaggccaggcggtagccagcgccagcagggtcatggcgatcagcaccgaccggcggccaaagcggtcggacagcgccccgcccaccggcagccagaagaagttggaaatcgccaccagcagcgtgaccagcaggctgtcagaggcgctgagcatcagcacctttttaccaaaggtcggggcatagacggtgatcaggtagaacgcggtggtggtcatcgccaccatcatcatcccggcgataaccacctgccagttcgccagcagggtggcgaatacctggcgcatcgccagatgatggcggcgggcagtaaactcctgggtctcctccagcttacggcgcaggataaaaatgaacggaacaatcaggcagccgaaaaggaacggaatacgccagccccagtcgctgatagcgctcggctccagtaccgcgttgagggcaaagcccatcgcggctgccaccatgatggcaatctgctgactgcccgactgccagctggtgtaaaagcctttgcggcccgaggtggcgatctcggccagatagaccgacaccccgcccagctcggcgccggcggaaaagccctgcagcagacggccgatcagcaccagcagcggcgcccacaggccaatggtctgataagaggggatcagcacgatcaggaaggtgccggtggccatgatcgacagggtgacgatcagccccttgcgccgccccaccttgtcgatataggcgccaagtacgatagcgccgatggggcgcatcaaaaagccggcgccaaagaccgcgaaggtcatcatcagcgaggcgaattcactgctcgccggaaaaaaggtatgggcgatgtaggtggcataaaacccgaacagaaaaaagtcgaactgttcgagaaagttaccggacgtgacgcgcagaatggcgccgatccggtcacgggtactcatctgtgaggttgttgaatgcatgcaggtctccagtttgttatccacgcgttgtcgcgcgcctgtcgctgaagactgaaacagaaccgggaacgaaataagcgtaataaacgcatccactaatgcattttacgcatgaataacatttaactaattaacattacttttacatacaatcatttaacacacaccgtcctaaccacgccgcgggtgacggcgaaaaagtcagttttccgttttgtgaccggggccaggatatgtcgccgtgggttgaaggcataaaacctggcctggggtaacgaaataccctgccggctggaaagcgcgtcaggaagcggtggactcccccaccagcgtctgcaacagggagataagccagcgggtagcctcgcgtttcccgctgcgttggtgggcgtaaatcttgacgtcaaacggcggaaccggaaacggcagcgggaaaatggtcagccgggcggcgcgggccatcgtctccgccgcccgccggggcagcgccatcaacaggtcgctctgctcaataataaagggcgcgctcagcatcgagggggttttcatcgccacctgccgcgaatagccctgtcgctccagctcacagtccagcaccccctgccgctcattccacggggtcaccaccagatgacgggccgcaaggtaggcgtccagggtcagcgccgtccggttggcctggctgatgaccacatattcgtcccgcagccagttaatctcctcaagatcgggatgggctggctcgtcaggggtattgaacccgagggccaggtcgacctcgcccgccagcagctcggtcagcgccgggctgtggggcagataacggagctcaaaccgcagcccgggcgcctcacgctgcaggtgatgcatcagcgtcggaaagacgcagaacgcggtgaaatcggtgatcgcaatctgcatgcagtcggtgctggcggccggcacaaacgccgccggcggcgtcagctcctggttgagaaacttcagcgccgaagcgatagagggcgccagctggctggcatagacgctggggcacatccggtggccttcgcggtagaacagcggatcgttgagggcgctgcgcagccgggaaagcgcatggctcagcgccgaggtgctcatcgccagctcttccgccgccaggcgtaccgagcgggagcgatagaccgcgtcaaagaccggcaacaggttgaggtcaatccggcgcaggacaggatgcataatattcatcgtttgctgatttcattgcacttaattcttttcacaataccgcttatcctcagggtcagcaattttgctctcttttgactatggatacaggacaacccatgagcatcacaatccgccaggccaccccggacgacgccaccgctatctacgacatgatttatgaactcgcggtctacgagaaagcccccaagaggtagtgacgacgccagaggagatcagagagacactgtttgccagcggcagcaaaaccgaagcgctgatctgcgaggtggcgggcaaagcggtgggctacgcggtgttcttcaccagctactccacctggcttggacgcaatggtatctatatggaggatctgtacgtcacccccgactatcgcgggatcggcgccggaaaagcgctgctgaaaaccatcgcgcaatatgctgtacaacgtcagtgcgggcgtctggagtggagcgtgctcgactggaaccagccggcgattgatttctatctgagcattggcgcgcagccgcaggatgagtgggtgcgttatcgcctcactggcgatgcgctgcgggcctttgcggagtaaagcggctcgccagcaggtcggcgccaggcgtcgacctgctggccgcggatcaggcttcgaccgcgctcttctgcagctgcggaccggccagcgccagacgcgcacccgcttcggtatcgctgtactgcttgaagttatctataaacagctgagccaggctctcggccttctcctgccatttatccgctgaactccagccattacgcggatccagcaccgcgctgtctacccctggaatgctctgcgggatcgcaagaccgaacaccgggatggtctcctcgcgcagcgggccggtagtgccgttgaggatcgcgctaatgatgctgcgggtatcgcgcagcgacaggcgtttgccctcgccgttccagccggtgttgaccagccaggcttcggcaccggattccgccatcttcgccgccaggacgctggcgtactgggtcgggtgaagcagcaggaacgccgcgccatagcaggcggagaaggtcggcgtcggctgggtaatgccgcgctcggtgcccgccagcttcgaggtgaaacccgacaggaaatggtactgcatctgctcggtggtcagacgggagaccggcggcaggacgccaaacgcatcggcggcaaggaaaatcaccttcgacggatggcccgcgcgggacaccggcttgacgatattgtcgatatgcgacagcggataggagacgcgggtgttttcggttttgctgccgtcggcataatccacgctgccgtcagcgcgcaccaccacgttttccagcagcgcattgcggcggatggcgccataaatctccggctccgcctgcggatcgagattgatggtcttagcgtagcagccgccttcgaagttaaacacgccgtcatcgtcccaaccgtgctcatcatcgccgatcagctgacgatgcggatcggtcgacagggtggttttcccggtcccggagaggccgaagaacagcgccacgtcccctgcttcgccacggttggccgagcagtgcatcgacgcgatgcctttctgcggcagcaggtagttcatgaccgagaacagccctttcttcatttcgccgccgtaccaggtgccgccgatgagctgaatacgctcgctgagattaaaggcgacaaagttctcggagttcatcccctgcgcctgccagttggcattggtgcagcccgcgccgttgagcaccacgaagtctggcgtaaagctggccagctcgtcggcgcttggcacgatgaacatgtttttgacaaagtgggcctgccacgccacctcggtgacgaagcgtacgccaagacgggtgtccgggctggcgccgcaccaggcgtcgatgacgtacagttttttgccgctcagctggcccgcgaccaggcttttcaggctgcgccacacgtctggcgataacggcttattgtcattacggccgaggccggagtctgcccaccagacggtgtcgcgagtctgttcgtcgcggacgatgtatttatcgcgcggcgaacggccggtgaagatcccggtatcaacagccacagcgccagagtcggtcatcacgccgcgggccgcgccggtcagctcaggagaggtttcatgtgcaataagcaaatcgtaatcagggttgtaatagaattcgccgcttgcattaatccccagctcctgcagagccatttttactgattcaatttgttgtgacatggaactcctgacaaactatttaaggtaagaggcctgggttattcattgctttcgtcatcgtcgccggctatttaataagataagtcctggacaatgaaataaagcaataaataaccgtgagtcgcgatttcatatcgtgctcatgtagggtcgccgatatgcattcataaatctcaactttccaaaaaatgttaacacctgtcgataattatgttaattgcatagtttctatgcgctatgctaaaattgcatagcctttattgcgtttttgaggactggatcggtgttggcaaatctggaagtaaaatggctgtatgatgtgattgccctcgaggagtcgcgcagctttaccctggcggccaaagcccgcaacatctctcagtcctcgttcagtcgacgcatccagtcgctggaggcttccctcggattcagcatcttcgatcgtagcgccaaccctctgcagctgaccaaccgcgggaaaatttttgtcggctatgcgcgaaatatgctcgatgacatggattttcagatcagccgtattaaaggcttaaataacactacccagaaaataaggatcgacgccgccccttcgctgtcggtgttattactgcccgagatcatcgccggttacaccgaccgtaaaaataagacttttcatgttgaatcgattaacgtcaacgacgccgtatttaacctgaaagagggaaaaagcgattttatcctctccttctataatgaagaattgatgaactatccgtttattaatcataaaatttttgattcttatctgcacctggtctccccctgcgacgaacatggccgcccgctgtttcatttacatcgcggcgtgctgccgctgatgaaatacgccaacgacagctatatggggcgccaggtgaaccaggtgatcgaccgcacgccggagatcaccttctctctcacctttgtctcttccatgagcgagctgctcaagcgcatgatcctcaatggcgacggcgtgggctggctgccgcagtactccattcagcgcgagctggacgaaggccggctgacgatcctcgatgagagcctgtcgctgccgatcggcgcctggctctaccgctccggctcgcggcttaaccaggccgccgaacgtttctggcagcacattaaaacccgtaacgaaccgcgggaataaccccctcagccgctgatccccagatatgccttacgcacctccgggtcgttgagcagcgtctggccgctaccgctcaggcggatctggccgttcaccatcacgtaggcgcggtccgacaggttgagggcatggcgggcattctgctccaccagaaacagcgtcatcccctgagccgtcagctcgcgcaggatctggaaaatctgcttcaccaccagcggcgccagccccaggctcggctcatccagcagcagcaggcgcggtcggctcatcagcgcccgggcgatggccagcatctgctgctcgccgccggagagggtcatcgcccgctgtccccgccgctcttccagccgggggaacagctggtacattcgcgccttgtcctcggcctgatagcggttgccaatggcaatggtccccatcagcagattttcctcgacggtcatatcgggaaagatgcgccgcccttccggggcctgggcgatgccgttgctggcgataaagtgggtcgatttccggctgatcgcctccccgcgatagaaaatctccccgccggcaatgcgcggctggccgaagaccgacatcagcagcgttgatttaccggcgccgttggcgccgatcagcgccaccgtctccccctcgttgacggtgagggagacctgcttcagggcctggatcggcccgtagaagacatccacctcattaaaggcaagcaaaggctggctcatcggcgcgtctcctcttcctcagcgccaagataggcggcaatcacactggcgttggcctggatcgcctgcggcgcgccgcgggcgatgacgtccccgtgatcgaggacgatgatatgatccgaaatctccatcaccatccccatatcatgctcgatcagtagcaccgtaatgccgtgctgctggcgcagaaagcgaataatccggctcagcgcctgggtttccaccgggttgaggccggcggccggctcgtccagacagatcatctccggacgggtgcacatggcgcgggcgatctccagccgccgctgctgtccgtaggagagggtccccgccagacggttggcgcagtccaccatctccaccacctccagccagtaaaaagcgcgatccagcgcctgactctccgcctgccgatacccacgggtattgaggatcccggccagcagatggcggttgacctgggtatgctgggccaccagcaggttctcgatcaccgacatctcgcggaataaacgtatattctggaaggtgcgcgccaggccagcgcggttcaccagatgggtgccaccgaacatcttgtaatagatccgcctccccagctgcgccgggtggagaaaatcgtccgggtgaagcttctgccccagcacctgaataacatcggtgaccttttcccgcgcccgcagcacgatactgccccccgtcgcccgataaaaaccggtcaggcaattaaacaccgtggtcttgcccgcgccgttggggccgatcagggcggtgatcgacccccgctccacctccagattgacatcattcagcgctttgatgccgccgaaatgcatcatcagatgctcaacgcgtaagatgctgtcggtcatggcgcgactccttttcgcaacgcaaccccgctgcggctggtgcgcaccaggccgcgcggccgccagatcatcatcatcaccatcagcacgccgaacagcagcacccgatattcgtcaaaaccgcgcagcagctccggggtgaccgtcagaacaaacgccgccagtaccacacccagggtggagcccattcccccgagcaccacaatcgccaggatcagcgccgactcaaaaaaggtgaacgacgtcgggttaacaaacccctgatagctggcgaagaacaccccggcgatgccggccgtcgacgcgccgagcataaacgccgagagcttcaccagcacgtggttgagccccatcgcccgacaggcgatctcatcctctcgcagcgcctcccaggcgcggccgatgggcatccgcgtcaggcgatgcttcaccagcagcaccagcatcaccaccaggcacagcacggcgtagagaaagatgaatttcaggttggggttgtagctgacgtggaaaaactcatggatggggatgccgccatccttggcccggcgggtaaactcgaggccaaacagcgtgggggatggcaccggtacgccgttagggccgccggtgaagctcacccagttgttgagcaccaggcggataatttcgccaaagccgagggtgacgatggccagatagtcgccatgcatacgcagcaccggaaagcccagcaacgccccggcgagagccgccatcaccgcccccagcggcagcatcgcccagaagccaagtcccaggtactggtagcccagcgccaggccgtaggcgccgatggcgtaaaacgccacatagcccagatcgagcaggcccgcgaggcccaccacaatattcaaccccaggccaagcagaacgtagatcagcccaagaatggccacggtcagcagatattttgtggcgagaaacggaaagacaatggccagccccaccagcagcggtattatccagcgcagccgcgagcggtagcccggcggccggacgtacaccccgtcatccgccccctcaaagcgggcaataaaggcttttcccctgtggctctgcagcagcagactgagcgccagcctgccggccatcaccaccgccaccagaatcgccacccgcgcaggcgcgagggtaaaaccataccctttgagcaccacgccgacgatcgggccaaagacaattaacgcgcaaaggccggccagtacgctgtcgatcagcgcgttttggatagcccgcgcaggctggcgcgtaatttcacccataaagcctccttagaccttggccaccagcggacgtcccagcagcccctgcgggcgaaaaatcaggatcgccaccagcagcgcaaaggaaaagacatctttgtaatccgaattcaccagcccggcgaactgggcttcggccaccccaagcagcagaccacccagcatcgcgccaggcagcgagccgatcccgcccagcaccgcggcggtgaaggctttgatgccgataataaatccgatatagaagtcgaaggtgccgtagttcatggtcaccagcacgccggccagaccggccatcgccgcgccgatgacaaacaccagggagatcacccggtcggtattgatgccaaggatcgccgccatgcgccggtcctgctgggtggcgcggcagatgcgccccagccgggtatactgaataatccaggtcaggataagcatccccaccagcgccgcgacgagaataaacaccttggtccaggtgatctgcaccaccccatcgcccaccgtcatgcgcaacgcgccgctaagcagcgtcgggatcccctgctggttcggcccctggctcagctggacatagttctgcaggatcagcgacatcccgatagccgagatcagcggcgccagccgcgtcgagttgcgcagcggccggtaggcgatgcgctcgatcgcccagccgtatacgccggtgaccacgatggtgaacaccagggtggcgaaaatcagcagcgggaaggagtggatcccgaagaaagagagcagcgccaggccgatggcgcacaggtaggcggagaccatatacacctcgccgtgggcgaagttgatcatgccgatgatcccatacaccatggtgtagccgatggcgattaagccgtacactgcgcccagcgtcagcccattgatcagttgttgcagaaaaaacgccgtcatagtccctccagccgccaggcagacggccgccgggttccgttctcggtcaaccgccgtcatgtgacaattcgcaagtcaaaaggacagagcgtcctcaggtcgtggccgatcagagctggtgatatttgcccttgtcgtcccactgatagaccacgtagtcggacaccttgaggtcgcctttgccatcccaggctttcttgcccatcaccgtctcgacgtcgtggctcttcagccagtcgctggctttggcgttatcggtaccgacggcgttccaggccgcggcgatagcctgaatggaggcgtaggcgtagagggtataaccttccggctcaaagccgctggcgcggaacttctcgatcaccgctttgccgtcggggagggtgcgcggatcctgaccaaaggtcatcagcacgccgttggtgaactgcggcccgccggcggccgtgaccagctcctcggtgacgatacagtcgccggagaagaatttggcctgcaccccctgctcgcgcatctggcgcaccagcgggcccgcttcaggatggcagccgccaaagtagaccacgtccggcttgagggcgccgatcttggtcaccagggcgttaaagtctttttcaccgcgggaaaggccttcgtacaacacttctttggtaccccgcttcgccagcgccgcgcgggtggcatcggccagcccctgaccataggtgtctttatcgtggatgacggcgattttcttcgccttcagcacgtccagcatatagttggcggcgatcgccccctgctgatcgtcacgaccacacatgcggaagagatctttcatgccgcgctcggtgatctgcgggttggtcgagccgggggtaatggtcaggatcccggcttcgtcatatacctcggaggccggcatcgttgaggaagagcaaaagtgccccaccacggcggagactttcgcttcatccaccagccggttggccaccgccaccgcctgcttcggttcgcacgcgtcatccccctgcaccagcacaatcttttcgcctttgatgccgccggcggcattgatatcggccaccgcctgcgaggcccccttccagtactgggcgccgtaggtggcgttggggccggtaaagggcccggcgacgccgatcttcacgtctgcctgggcgtaaaaggccatgctcatacaacctgctatcacaacatgaagcgtcattgttttcagtttcaaagacattcggatattcctcagcgatgtaaagcctggcgtcatggaatgacgcagaaaatatcacttaccgtgtggtgccgacgttggcgcagcgccaggacggccagggtggaagaagcaaaaatcccgccaggaaggagtggaacaccggagaacagtcgccccggtcggtacgcacgcgacggcaacccgtgccgcatccggcaagggcgcattccctttcaggtcaggagatcggttgccatcacgtggcgagccggacaacgcggtatccgtaccggcccgtgagctaaacatagatgcagttagcggtcgctgcgcgccagcgtggtgcaaaaatgcgaatatgatcaacagtggtgattattttgttgcggtaatgtgaagatgataacaggagagcccgttaaaggctctcctgtgacccggtggccgctcagagttgactggtgaacgttcgggagatcacatcctgctgctgttcgcgggtcagcgcgttaaagcggaccgcatagccggagacgcggatcgtcagattcggatactgctccgggtgttctatcgcatcgagcagcttttcccggttcagcacattgacgttgagatgctgtccccctccaccgtctcctcgtggtggaagtagccgtccagcaggcccaccaggttgttttcctgcgctgacggggctttgccgagcgccgccagcacgatggagaaggtatacgagatgccatctttggcgtaggtaaacggcagtttcgccaccgaggtcagcgacgccaccgcccctttccggtcgcggccatgcatcggattggcccccggagcgaacggcgtccccgcccgacgtccgtccggggtgttgccggttttctggccgtataccacgttggaggtgatggtcaggatcgactgggtcggcaccgcctgacgccaggtggggagcgcctgaattttgcgcataaagcgctccaccaggtcgcaggcgatggcatcgacccgatcgtcgttgttgccgtactgcggatagtcgccttcaatgacaaagtccaccgccagcccgtggtgatcgcgcaccggcttcacccgggcgtactttatcgccgacaacgaatccgccgctaccgacaggccggcgatgccgcaggccatcgtgcggtagacgtcgcggtcgtgcagggccatcagcgccgcctcgtagctgtacttatcatgcatgcaatggatgatgttcagcgcgctgatgtactgcaccgccagccagtccataaagtggtcgaggctggccatcacggtgtcgtagtccagcacctcatcacgcagagggtcggttttcggccctacctggatcttcagtttctcatccaccccgccgttaatcgcgtagagcagcgttttggcgagattggcgcgggcgccgaagaactgcatctgcttgccgatcaccatcgggctgacgcagcaggcgatggcgtagtcgtcgctgtgaaaatcgctgcgcatcagatcgtcgttctcatactgcagcgacgaggtggcgatagagacccgggcggcatattttttaaacgccgccggcagcgcttgcgaccagagcacggtcaggttcggctccggcgccgggcccatggtgtgcagagtatgcagatagcggaaggtggttttgctgaccagggtgcgaccatccagccccatgccgcccagcacctccgtcgcccagatgggatccccggagaacagcgaatcaaattccggggtgcgcaggaaacgcaccatgcggatcttcatgatgaagtgatcaatgagctcctgggcctgctcctcattcaataaaccggcgcgcagatcgcgttcgatatagatgtcgaggaaggtggccgtgcgccccagcgacatggcgccgccgttctgcgacttcaccgccgccaggtaggcgaagtagagccactgcaccgcctcccgggcagtgcgcgccgggtgggcgatatcgcagccgtagcgggccgccatctcctgcatctgcagcagcgcgcgccgctgttcggccagctcctcgcgcaggcgcagggtggcctccagcgcctcgccgcgctcaagggccggctgcaggtcggcaaactgcagctcacgttcgcggaccagatagcgaatgccgtacagcgccacgcggcggtaatcgccgatgatccgtccgcggccatagccgtccggtagcccggtcagcaccccggatttgcggcagcgcagcatatccggggaatagacgtcaaaaacgccctgattgtgggtcttacgcagcgccgtaaactgatactcaaagtcaggatccatttcgcgaccataggcctcgaaggcgcttttgatcatcttgatgccgccaaaaggatgcagggcgcgcttcagcggctggtccgtttgcaggccgacgatcttttccagcggctggttgatatagcccgccgcgtgggcggtgatggaggtggcgacattggtgtcgaaatccaccggcgcatgggtggcgttctcgacgcggatcccggccatcacctgctcccagagggcggtggtcgctggcgtcgcgttagcgaggaaagactcatcgccctcgtaaggggtgtagttatgctgaataaagtcgcgaacgtcgatctgcgtttgccacgccgtaccgcgaaagccctgccaggcgtcggcgtatcgtacatcctgggtatcgatatctactttcatgaacatcgtctctctacagaataaaaagtcaggccagcgccgccgcggtgtggatccggcctaagcggatcgcatcgagggcaatcatgcgctcttcattggtaggaataaccgcgcagcgcacccggctgccgtcggcggagatcaggcgctcgccggccgaattgggctgctgattgcgggcggcgtccatcgcaaggccaaagaccgccagccgctcgctcaccagccgacggatcagcaccgagttctcgccaatcccgccggtgaaaataatgccgtcgagacgctgcagcgccgcggcgtggccggcaatatggcgggcgatacgatggacaaaggttttaatcgccaggcgggcgcgggcatggccctcatgccacgcctgctccagcacccgcaggtcggaggaaagaccggagatccccagcaggccggaggcggtgttggctacccgctccaggtcgctgagggtctgccgggtttccccggcaatccacgccatggcgccgaagtcgacatcaccgctgcgggtgcccatcatcagcccctccagcggcgtcatccccatcgaggtgtccacgctgcggccgttacgcaccgcgcagatcgaggcgccattgcccaggtgggcgatcaccaggccgctctcctgctccggcaacccgagcagcgccagggcgcgctgggacacatagcggtgcgaggtgccgtggaaaccgtagcggcgtaccccgagattctggtaatactcccacggcagaccatagagaaaagcttccggggccagggtctggtgaaagctggtatcaaagaccgccacctgcatcacctccgggaacagccgctgcgccgaggcgatgccgctgagactggcgtagttatgcagcggggccagggacgatacctggcgaatgttattgataacctcctcgctaataatgaccgactcggtgaacaggtcgccgccgtgggcgacgcggtggccaatcagggccacgctgtcgatgaggtcgcgttgggctaatgccccggcaatcgcctgcagggcgccttcgtagccgcgctgcgccagcgccaccggctcgccgccgttgagcgagagagacgcccgttccgcgttgatgccctcggccacgccgttgagcaggcagtcgcagctggcggcgtccaggacggaaaatttgattgacgacgagccgcagttaatcaccagtactaccggaaattcagtcatgttgtactccgcgtggcctgagccggattagaacagtttgtaagcaatgttgaggatggtcagcagaccgatagcggtcacaaagaggttgtcgagacggccacggtatttggccagcgaaggcgctttacgaatggcgtacatcggcagcaggcacagcagcgaggcgataatcggcgcgcccatcgcctcaatcaggtcgaggatattggggttggcatacgccaccacccaggtcgagcccatgatgaacaccatgctcagggtattgagcttgccgctggagacccgggttttatcccctttatagccaaagcgcaggatcagaccgttcagcccttcgagcgtgccgagatagtggccgaaaaacgatttgaagatggccaccagggcgatgatcgacgcgccatactccagcagggtggcaaaggtggatttggtgcccgacatcgaggcaaagtggttcgccagataggagagcaccgggatattctgcgccttggcgtccgccatgttctgcggtgagagggtaaacaggcagctgaaggcgaagaacatcaccaccgccaccatcagcatgctggcccgggagatgatctgtgagcatttgcgttcggtatactcgcggccaaactgcgcttcatactcttcgcgtttggagaccacaaacgaggagacgatcggcgagaagttgaaggagaacaccatgatggagatgcccagccataccgtcaccagaatgccgtcgtgaccggttaaggcgatatcgctgaggttgacctggtcaatcaccgcgctattccagtaggggatcagggacagggagatcaccaccaggctggcgataaacggccacaccagatagctcatcaccttgaccatcaggtctttaccaaaccagatgacaaacgccatcagcagcagcaggagcagcgccaccaccccgcggttgagagccggcatctgcagctggttctcccagaaagtcataaaggtattggtgatcgtgacgccataaatccacagcagtgggcagatggcgaagaagtacagaaaggtgatcaccaccccgccggttttgccaaaatgctcttccaccgtttcggtgatattgccggaggggttagcccccgacaggcatagccgggccagggcccgatggcaataaaaggcgatgggataggccagcaccagcatcaccaggatcgggatcagcccgccgaagccggcgcggatcgggaaaaacagcaccccggcgccgatagcggtgccaaacaggcccagggtccaggtggtgtcagatttacgccaggacgaaaggcttgtctggctggatgcaatgctctcagtcgtactcatatcctgtcctcacttatgtattgaattaagcgtcaacaaaaccggtaatttgcgatacccgggagagatcgatattgcccccggaaatcaggctgaccgttttgcggttctggatatagctgtcgagtttgccgcttaataacgcggcgcaggctaacgccccggccccttcggtgatcactttattgcgctgaattaaggcgaccatgctctggcgaatgtcatcctcactcaccaggacgatgtcatccaccagctggcgggcgatttcataggtcagtttccccgggcgggcgacgtcgcaaccatcggctaaggtgccggcgtggcgatggctggtgatttccccggcataccaggaggcggccatgccgtgaacattctccgactgcacgccgataatgcggattgtcgggttaatggatttaatcgcgatcgcgataccggcaattaagccgccgccgccaatgggcacgatgacattatccacgtcatacagatcttctaatatttcgagtccaatagtcccctgcccggcgataacctgcgggtcgtcataggggggaataaaaatgcggccctcaagttcaacaatatcgctggctttggcgagggtatcgttaaagttatcgccatgtagcaccacttccgccgaataatcacaggtggcggcaactttcgatttcggcgcccctttcggcatcaccactttcccgtcaatgccgagcatggcgcaggagagcgagacgccctgggcgtggttgcccgctgagcaggccaccacccctttgcgtttttccgccgcggttaaaccgcacagtttattaaaggcgccgcgaattttaaatgaacccgtgcgctgcatattttcgaatttaagaaatatttcgccctggcagcgctcgctaaaataattcgaacggggcatgcctgttttatatatttttcccgcgaggcgttgtttcgcttcgagaatatcgtcaatagataccggaagatcgtaggtaatatgcattatggcctctgtatcttaatataaagtcaatgaccgggcgtcatcctgctgataacagcgaggacgtgtgttggattatttaacgactttcagttacgcaataatttgtaatggctgccagtggcggttgccctgccccgaggaatagtgtttcgccatctccaccagcgacgccgcggcggtttttaaccggtaatttttcgaccataccgccgcatagcgcgccaccggcaaggcctctttaatggggatggtgacaaactggctcgagccaaacggcgtggtcatgtcgcaggggatcaccgtcaggaaatcggcattgagcaccaggttatagatcgtcaccaccgaatcggtattaacgatattttcacggcggataccgctgcgctgcagggtggtcagcagttcgctgtagtagcccatattggtctccggcagcacccactgctcgtgctggagcgaggccaggcggacggtgccgttgccgatccgcgcccggttcgccaccagcacaaactcagactcaaacagcggctcgacgtgcaggtcctgcagtttcatctcatcgctcagcgtcccgatggcgaagtcgaggcgcccgtcgcggattgccggcaaaaaggcggagagctgcgcctcatacatcgagacccgcgccttggggaaagtcattttaaactgatgcaccatctccgacataaaggtaaacccgaccagcgaagggaaaccaaaggagacatccaccaccgcgctgttggtcagagcattcatttcattgaccatatttttcatttcacgggtgatcgcttctgaccagttgagaaatacctgcccggcctcggtgagcgagacgccggtatttcgccggacgattaattcgctgccaaaataactctccatgtcgccaataattttactgaccgccggctgagtgagtcctaacgcttttgctccggccccgattgacccgctgcggatcacttcctggaaaactaccagatgctgtgttttaggcagagaaaaagtattcatcgcgtctcactttcattcctttgttgacggcggaaagtgtaacaaatcgcaattgccgggttatgtgagagctctcacaaaggctccgccgcggcggataagcaggatccacgagccagaataagtaaagtaaaatcaatacattaaaagcatcatgaacgctatttgcgcgccttttgccgtggccgaatgcggggataaaaataattgatggcgataacatcgacggcgaaatggcgataaaaaatacgccttttgtacgttattcgacccgcgctatcagggtgagaagaaagccgaaaattaaattaatgctgtaaagaataaaaagcagacgtaataaacgccattatttaacgacaagccggtcgggcatcacattttatccccggcggttggggaaaatgcacggtcattatttacaccaaagaaacattaaattcacaatttttcttttgggtcgcgataggcagcgatcttttttccgccatagcgcagttggtcatactttgattaaaatcaaccctggtaatttatcttttacgacggccattggagagtcatttgtgttgccgatcacaaatccataaaacaacgacccggcctatcgtgaagagatgatcccgcggctgcgccagcagcttaacgagcagctgatgagcgaccagctggctgtcgacctgctctcttcctatctgcgaatggatctcagcgcccagccgtgggaccagccgctatagcccgccccggcgcagatcgctggcccgggcatttcgcctatagctggctgacccccagcgccgcggcctcatcccgccacgccagcagcggcgcataggcctcccgcgacatatcgctatagccgcagatcagcaaggcgtcgcacagggaacgatagcgatcatcgcttaccagctgctggagcgcctcgcgcaggctattcagcgttgccgccggggtggcgccggcggtgatcagcggcagccctggcacggccgggctccagccgatcgccaccaggccagccagagcctgcggctgatggcgctgcagcagagcgtaggtcacgcagtcgatggcggcgatatcggcgttttcctgctgcagttcgcgcagcgattgccgatggctgccgctgaacatcaccgctgaaaaaaaacgcccctcccgggagagcggcgcgaccattttacgcagtacgttgtagccggactgcgagtgctcggcattgcacaccgcccgacggccaaaaaagtcccccagcatccggtgactatccgcttcgcggaccaccagcaggctgcgatagcggcgcccttcgcaaccgggcgcagcgtagtggaagcagcccaccgtctgcacctccggcaattgggtcaccagcgggtagccacaggtctggctcagcaacagcgtcggctggcgccagtgagccagcagatccccggggtcagccgccggagggtcccccgccaccatcacgccgcgttcgtccagcagcgactgcaccgcctgccacagggcctgggtctgttgacggtggatggcatacatcggaaaagtcatgcgttcagccatattctcctcccgcctgcgcctgctcgccaaagcccggatgggcgttcaccgctaccgcccggcggctaaaatggcgtcgccactcgccgtacccgcgcaccaggaacccctgattacgctgcagatacgccgcctggcgatgcagatacagttgacgtaaagcgtaccaggggacccctggcagatcatgatgcaccgcatggtagttgagattgaggaacagcacccgccaggggagcccggcctcgttgatcaccgagcgggccagcgggtcatccgcggcgcggtgttcgagaaaagagcgtactttggtcagggccagcgccgggtagctcaccgccagcacaaaccacagcggagaaaaaccctgcgccgccatccaggtcagcagacccgtcagcagcaacagatgcagactccacatggagatagcgcggcggtcgccctcgcggaaagcccacagcgcgctgttcagggtgtgaataatatccatcatcggcgccagcagcagacgcccccagaaggtgttgcgcaggtggataaggcggcgctgccaggctgagaagcgctgccagctttccgccgttacgtagtacgattcggggtcatcctcagggtgcgtcagcagatggttgcgatggtgcgccaggtggctgtcgcggtagacgccatagggataccagaccgccagcggcagcgtccccaacagctggttaaaccatgccagccgggtgggatgcccatggatcagctcatgctgtaaggacatataccaggcggtaaaccagatcaacagcagcgtggccggaaacagtcccagcgtccgccagcccgccacgcaggcaaaccagccgccgtaaaccgtcacaatcagcagccaggtcggcagctcgctgcgccacagccagctgcgcgccagctggcggatcaggatgcgctgttggtcatccacatagacagccgtcttcttttccgtcacttccgataccttgccgtgttgcctcattcccaccgaagatgtgagataacacgttaaataacaaagtatttaattgacttagctttgccaaaaagcgcgtttgtattcagcaggacaaagagaataccgtccatggcgcaacaggttggcggtgtttacattgcgctcgattctcgctgccgttgtacttgtaactgtttgaagatctcctcaactgccatccggttatgatacttcgcctgaagactataatcgtattttgttaatgcgcggtcccagtaggtagcaacggccagctggacttcagggaacgagagtaactgaagacactcttcaaactcaccctcaaaccagatttgctgcgcgtgtgataaagctgttttataaattggtttttcaatccctcctttatggtccgtcacccaccgaacaatatcgggatagtccatgataagctcatctgctaataacatatgaatttgacaatcgcgggaccgcgttgaataagcgacttcgtggctatggatactaagcgtaaaataccgggaccatccgctatgcgcccctgggaacagactaaacacccaaaccccttctttatgtcgccatttttcacaaccggcgatagcgaatagttttaccaggtaatctctcaacccctggtgatgaaaaagtcggtcgattttaggtttagtcgtcaacggttgttgatcaaggctggcaagatgatgggcagccagttcaggcgtgacattaaatagctctttctgatttgcaatagtccgcacgcgagaatctcgaaaaagatagtgcagccaggtttcgacattatgccagtcaggtacgctacggtagtctgctacccgccatggggcatataaacaatagggtggctgggtattaatctccttacaccgcttctctggcaaataatccgtgccaccaattttaatatacggtgttttatctgataccagtatatatacgtagccatacgtattttcattattcatactgcctcctgcaacatattctcctcagttacaacagaatacggtatggcatgaatgctttaattatcctggtatcacatatttcttattacgtttcaccgaacctgcgtttcggttgtatatcacgtttcgttcgcgggctgacctcctgttggccttcgcaccacaattaaatgcagagaacctcgccagacgcgccacgtagtcagatacaacgcaggaaaatgcttaccacagcccggaagcccctttcccaggccggacaaggacagcggcgtcgcttttgtgccgggcggcggcgacgccttgcccggcctacaatccgtgcggcctgtcgttaatttatttaccgctgttgctgaaattttaccgccaggtcgaggatactaaaggactccagcgccttacccgccttcgcgccgacgataccggcggagcgtcacagcgactactcctcttcccgctccgctggcgtccaggtcggcagagtctggaaggtgtgcaacagcccttcggaccacgccttgcgaatgcggttgaagtagggatcgctgtcggtgatgcgatgctgcccggcactgctgaagctgccgctgcggtagagcagcgtatccagcggcaggccgacggacagattactgcgcagcgtcgaatcaatggagatcaacacgcagcacatcgcctgctccagcggcgtgtcgatggtcagcacccgatcgatgatcggtttgccgtatttgctttcgccaatctggaaataaggcgtgtcgcgggtggcttcaataaagttgccctccggataaatatggaacagacgatgggtttcgccggcgatctggccgccaagcagcaggttgcagttgaagttggtgttactgcaggtctgctggttgctgctgtcgcgctggatcacctccagcagcgttttaccgatcagcatcgcggcgtcgtagagggaagtgacctgcatcagattcggctcctgctgggtacggatgcgcgcgctgagcaggcttatcacgctctgggtggtggccagattgccggcggattgcagcaccagcacccgttccccctcctgatggaaaacgtgcagctttttaaaagtggcaatatggtcgacgcccgcgttggtgcgggagtcggaagcaaacaccagtccatccgccaggcacatggccacacagtaggtcattgcggttattcccgtattattgctgctgcgcctgctggctgtgttcgcgcacttcagcgttagttaacataatctccccgcccccacccagccgggtgccccgtaccgggcaggcgtcgagataatccagcccggtcgccagccgtaaatgctgattcaggcgacgggtattattggtgatatcaaacgacagccagcggccgtcgagccagacttccgcccaggcatgcatcgccacatgctgggcgttatcgctgtagacatagccgctgacgtagcgcgccgggatctccagcgcgcggcagcaggcgagaaaaacatgggtatgatcctggcacacccccttcgcgcgggcgaaggcgtcggcggcggagtcctgcacctgggtcgcgccgggggagtatggcattcttaacagcagatccgccatcagttgattcagactctcttccgccgcatcgggacgatagaggcgctgggcaaactcacggatcgccgtatcggcgcgggttagcggcgtacagcgcagaaaaaccagcggcgacagcagctcggcctcttcatcacgcgtctcctccccttcgtcggcgatatcgacaatcccgctggcgcggatggtgatctccttgtgcgggttatccagcgtcagcacatgcagcacattgccccagccgtcggtagtggtcaccgccgcgccgtccggcagggtcagcgtccaggcggtgatcgtctgccggccggtactgcgcggcgtcaggcgcagatactgggtggaaaacttcacttcttcatcgtagccatagcgggtgagatgatcgatgaccagtttcataaggcctccagataggtttgtctgatgctgtcggacagcgcgttaattctcgccagcagcccgttaagggtggtctgcaggtccgcctgcgccaggtcgtcacgggtgctgaagcgcagatcaacgttaagctgatgggcgaggcgcagcggttgataggagcggtcgttggcgatcttctccagctcgcccaccagatcggcaatgctggcgcgcagcgaacgcggaatatcgttgcgcaggatcagcagctccatcaccgtttcgcgactgaccggctggcggtagaggctgttgtaggcttcgcgggcgctgaccgcattgagcagggtatccagccggtagtattcccgcaccgggtccggatcgttggtcagctgttgatccttaatcagcagcagctgggtggtggcgaaggcgcgctcaatcagggtgccgataccgataaagctcagggcgtcgttgcgcagcagcgtgcctatcaccgctccgcgaaacagatgcacccgctctttcacccactcaaaaaagccgtcgctccccagctcgcccagcccttgctggcggagggtccgcagttcaatgcgggtggcattgatgctctcccacacttcggccgacagactgccgcgcaccgcgtgcgcgttgttccacgccatctccacgcagctgtaaatactgcaggggttgttgccatcaagggcaaaaaagttgagcagattgctcatggtaaagcgggcatggcgcgcctgaaacaactcgtgggtcatcgacaaattcagcggcagcgccagatcccgcgactgctggctgtggcgggggatcattgataatttccaggtcacgtccagcacccgggcgtagctctccgcccgctcgagatagcgggccatccagaacagttcactcgccgtacgacttagcatgatgcgtcatcctccatcacccaggtatccttggttccgccgccctgcgacgagttgaccaccagcgacccttcggtgagggccacgcgggtcaggccgccgggcaccagccgcatctcctgcccggacagcacgtagggccgtaaatcgatatgtcgcggcgacagaccttcctcaacgaaggtggggcaggtcgacagcgcaagggtgtcctgggcgatatagttggccggattggccagcaggcgctggcggaaggcctctcgctcctctttagtcgaacgcgggccgaccagcatgccgtagcccccggcgccatggacctccttgaccaccatcagctcgagattgctcagcacgtagcgcaggtcctccgctttccggcactgccaggtggggatattgctgaggatcggctgttcgccgaggtaaaagcggatcatctccgggacgtacggatagatcgatttgtcgtcagccaccccggtgccgatggcgttggccagcactacgccgccggcgcgatagacggacagcagccccgggacgccgagcatcgaatcggcgcggaaggccagcgggtcgagccaggcgtcgtcgatgcggcgataaatcacatccacccgccgcggcccctcggtggtgcgcatatacaccgcgccgtttttaataaacagatcggcgctctccaccagctcgacccccatctgctgcgccaggaagctgtgctcgaagtaggcgctgttgaagcgacccggggtcatcaccacgacgcagggatcatccaccagcgagctttcgcgcagggtctgcaggaggtagctcgggtagcgctccaccggcgcaatgtgatgctgctcgaacatctccggatagaggcgcatcatcatcttacggttttcgagcatgtaggagacgccggacggcgtgcgcagattatcctccagcacgtagtactgaccgtcgttattgcgcaccatatcgacgccggtgatatgggcataggtgttgtttggcaggttgatgccctgcatgcacggctgatactgctcgttggccagcacctgctcggccgggatcagccccgcgcgcaggatattctgctcatgatagatgtcatagaggaaggcgttcagcgctttcacccgctggcgtatgccgcggtcaatgcgctgccactccccggcaggtatgatccgcggcacgctatcaaacgggatcagccgctcggtcccctcatcctcgccgtaaacgttaaaggtgatgccgatacggtgaaaaagcagttccgcttgcgcttttttctgccggatagagaattgatcggtgttgcgaaaccattgccaccaggcattatagtgcggccgctgttcaccctgcgcggtcagcatctcgtcataataatgcccgtcaggtagcgtaattttaatcatggctatcccctccggttgtactcactttgtggtaatcccgctaagagataagcattaattatgccaggtcctctgccgccgcggcgttgtgcaaatcggttcagccccgccgtctggttgtgcaaaaaatcgtcaaaacagccgcccgcgcccggcggcggctgcaccgtcgtgaggcagggcgacgttttttgcgccatcgtggacgccagcgccctcagccaggcggcccagcccgcggcggtctcaggagacctggcaggtaaatcctctgttttcgcgcaaaatgttacccctgacacgcgcagcggcagatattcgtctaaggtttttggatggccaaacgtcgtggcccgcagtcgataatgataaggagaactccccatgacgagtactgatgcacgtcgtcccgctgctttgccctgttccctgcgcctggcgatcggcggcgctctgatcgccctgatgagcctgaacgctcaggcggaagacggcaaaaccgcgccgcccccctcgccggatattctgctgggcccgctgttcaatgatgtccagagcgcgaagctgtttgccgatcagaaaaccttcgccgacgctatccctaacagcgatccgctgatgatccttgccgattaccggatgcaaaaaaaccaggccagcttcgacctgcgccacttcgtcgaactgaacttcacgctgccgaaagagaacgacacctatgtgccgcccaaagggcaaactctgcgtcaacatatcgatggcctgtggccggtcctgacccgcagcaccgtcgaggtggaaaaatgggactcgctgctgccgctgcctaagccctacgtggtgcccggaggacgtttccgcgaagtctattactgggacagctatttcaccatgctgggtcttgccgaaagcggtcactgggataaagtcgaggatatggtcgccaacttcgccgcggaaattgacgcctggggccatatccccaacggcaaccgcacctattatctcagccgttcgcagccccccttcttctcctttatggtgagcctgctggcgacgcacgatggcgaccaggtgctgaaaacctaccagccgcagctggagaaagagtatcgctactggatggccggagcggacgcgctggctcccggcagcgccgacaaacgggcggtgcggatggcggacggcgcgctgctcaaccgctactgggacgataacgacaccccgcgtcccgagtcctggcttgacgacgtcaaaaccgccaaaagcaacccgaatcgtccggcaaccgagatctatcgcgacctgcgctccgccgccgcctccggctgggatttcagctcccgctggatggacaatccgcagcagctcgccaccattcgcaccacctcgattgtcccggtcgatctcaatgccctgatgttccatctggagaaaaccctcgcccgcgccagcaaggcatccggggacagcgctggcgctacgcagtacgatgcgctggctaacgcccgccagcaggccatcgagaaatacctgtggaatgataaagagggatggtacgccgactacgatctgaaaagccacaaggtgcgcaatcagttgaccgcggcggcgctgttcccgctgtacgtcaatgccgcgtcacgcgagcgggcgacgaaagtggccgccgccgccgagtcgcgcctgcttaaacccggcgggctgaccaccaccaccgtcaacagcggccagcagtgggacgcccccaacggctgggcgccgctgcagtgggtggcggtcgaggggctgcaaaactatggtcagcagaagatcgccatggaggtcacctggcgcttcctgaccaacgtgcagcatacctatgacagtaagcaaaagctggtggagaagtatgacgtgagctcgaccggcaccggcggcggcggcggggaatatccgctgcaggacggctttggctggaccaacggcgtcaccctgaagatgttggatctgatctgcccgcaggagaaaccctgcgatgcgctgcccgctacccgtccggcgacaaccccttcaccgcaggacaaacctgttgcggcgcccgcggctaacgaccccgcccctgcggaaccgcaaaagaccggctcctgacgcttcgccgccccctaccaaaatcggtagggggggaagcggtctccctggtcactatcgtcccgcgcagacccattctgcggctcgcgggaaacacttccccaccccctcgcgttgaacaggtcaccttttcgcttgatcgcacaaatacaaacaataataattcgcattactttttaacgaataatgacagattcgtttttcacgcggcggcgtacaggagtaccagaccgcgttggttcaggatgatcttatgaacgtggctatttctcgaaaacgcccggggctgctgtatgcccttgcggtcgcactccccttcaccacgcaagccgaagagacggtggtggtcactgccaccccgccggcgtccgccagcgcgccgacggagggctacagcgccagcacctcgctcggggcgacgaaaaccgaccaaccgttaatcactaccgcccagtcggtgtcggtggtcacccgccagcagatggcggatcagggggcgaataccatcagccaggcgctggaatataccccgggggtctactccagcttcggcggcggcgccacccggttcgacgccatctccctgcgcggctaccacggcggcgacgtcgataacctgttcctcgacggcatgcgcctgatgagcgacggcggcagccataacgtattgcaaatcgacccgtggtttatcgaacgcgtggatgtgatccgcggcccctcctccgcgctctacgggcagagcgtgccgggcggcgtggtcaacctgacttccaaacgtccgcagttcagtcagcagggccacatccgcctgaccggcggcacgcaaaataccaaaggcgcggccttcgattacaccgacgccatcaatgaccagtgggcatggcggctgatcgggatgacccgcagcagcgacacgcagtatgaccatacccgcgaagagcgctacgcgatttcgccttccctgctgtggcagccggacagcgacacctcgctgctgctgcgcgcctatctgcaaaaagatccttccggcggctaccacggctctttgccgctggacggcacccgctacgcgcacaatggccgtaagctctcccccagcaccaacgaaggcgatccgggagatggctatcaacgccgccagcagatctacagctatgagtttgaccaccagttcaccgacgtctggtcggtctattccgccgggagctacacccataccaacgtctccctcgatcaggtctaccaggtcggctggatagatgacagcgacatgctggcccgcggctacagcggttcgcgcggttcgctggacggctggtcaaccgataaccgcctgcgcgccgatttcaatacaggcgacctggcacacaccctgatcctcggcgccgaatatcatcgcttccgtaacgacctgtggaccggcgccggcggcgcggcgccccttaacccgtttagcggctataccgcgcagaccggacataccgttacctacagcgacgacaataatcgccgctattaccagaccgggctgtatctgcaggatgagatggtctggaaccgctggcatgtggatgtttccgcccgctacgaccgcatcgtttcccagcaggtcagcgatacccaggggacctcaaaccgccgttcagacgaccatatcagcggccgcgcctcgctgttgtacgccctggacaacggtctgtcgccctacctgagctacagccaggcgatcactccggcgatgctgccgggcgcggacggcaaaccgttgaaaccgaccaccgccgaacaggttgaagccggcctgaagttccagccgccgggcagcagcgatctctatagcatcgcgatttacgacctgacgcaaaaggatgtcgccactcgcgacccgaacatcgccaccgccacctatattccggcgggtaaggtccattcccagggcgttgagctggaagcgcaccaccagatcaccccgcagctgagtactatcgcctcgtatacctggaatcgtctgcgtttccaggacaccaaagacgggaccgacaataacacgccgcagctgaccccggatcagatggcctccttctgggcgcgctatcagttcccggcggggatctccgttggcgccggcgtccgctacatcggtaaacagtgggcggatgatgccaacaccgcgcggctgccgtcggtcacgctgatggacgccatgatgcgggccgacctcagcgtctggtcgccaacgctgaaaggcgcttatgtgcaggttaacgccaacaatatcggcgaccgcgagtatatttccggctgctatggcaccggcaactgttactggggagcagagcgcagcgttatagccaccgtgggctacgatttctgaggacgtggcctccgggagactaccggaggccaaacgagggattacatggcgtccagcgctttctgtagtttccagatatagcgcggcgcctgcggtgccgggtgttttttcaccacatgttcgaagaactcatcggcgtcgagatcgttaatctcctcgatggcgtcctggcggttcgaggagaaggtacgcagcagcgcgccagcgccgttggcataggagaccaccaccgcatagcgcatcacctgcgggtctttgatccccgccagcggaccgttctccagaatgctcagataggcggcccccatcgagatattacgttccgggtttttcagctcactgaccgacggctcgccgcgccaccccatccgccgatagacatcgcgtccggaggtcgagggcttgagctgcatcagcccgacagcgccggatttactcaccaccgcaggattaccacccgactcgatggcgatgatcgccgtaatcagctgcggatccacgccccaggcggcgccggctttttcactgatcggcatccactgcatcgcccgcttcaccgggacctcggggttccacggcgggttagtgtaatcatgtttcgaactacaaccggccagaaaaacgactaaaataagcaaccatctcaatttcacacatctatccttatctacccaaacgccatcatgctacagaacgacggccgcggtacgtctcccgcctgccgacaacctgaaggatgacgggtgcggactgaagttagccacctggagatgacaatcgccattccaggcggcatcataaccctttcattcatagcaaggaattatcatgtctcagttttatctggtcgcgccatccgggtattgcatcaaccagcaggcggcagcccgcggcgtcgagcgtctgcagcaggccggacacgaggtggcccaccagcaggtcattccccgccggcagcagcgtttcgccgggactgaacatgaacggctggccgatattaaccagctggcccagttgcccggccgcaaccggatcgtcctcgccgtacgcggcggctacggcgccagtcgcctgctgccgcatatcgactggcaggggctggttgcccgccagcagcgcgacccgctgctgatttgcggccacagcgatttcaccgctatccagtcgggcctgctggccatgggcaacgtcatcaccttcagcggtccaatgctcgccggcaacttcggcgcggagaccctcgacccgtttaccgagcaccatttctggcaggcgctacgccagccggaattcaccctcgaatggccgggcgaagggccgaactgccgggtggaaggcaccctgtgggggggaaatctggcgatgctgacctcgcttatcggcacgccgtggctgccggcgatccgcgacggcatcctggtggtggaggatatcaatgagcacccgttccgcgtcgagcgcatgctgcttcagctgttgcacagcggcgtgctggcggcgcagaaagcggtgatcttcggcagcttcaccggcagcgcgccgaacgactatgacgcgggatacgatttgccgcaggtctttgattatctgcgccagcagctatccctgccgctgattagcggactggagtttggccacgagcagcgcacggtgaccctgccgctgggcgcccgcgcgcgcctggtgaatcaggcggcggccaccaccctgacgatcggcggccatccggtgctgacagaataaatttcccgaacgcataggcggatcccctgcgaattgttaaaatagtgtcacttttagccattttttcacgccagtcagggagtacgtgaacattggacgccgctgcggtcattagtctgtttattctgggttctgttttagtaacctgcagtatcttattgagctccttttcttcgcgccttggcatcccgattctggtcatctttctggccatcgggatgctggcaggcattgacggcatcggcggcatccccttcgacaattaccccttcgcctatatggtgagtaacctggcgctggcggtgatcctactggacggcgggatgcgcacccaggccagctcctttcgcgtcgcgctgtggcccgcgctgtcgctggcgacggttggggtgctgatcacctcggcgctgaccgggatgatggcggcctggttgttcaagctggatctgatcgaaggcctgctgatcggcgccattgtcggctccaccgacgccgcggcggtcttctcgctgctcggcggcaaggggctcaacgagcgcgtcggctcgacgctggagatagagtcaggcagtaacgacccgatggcggtcttcctgaccatcaccctgatcgaaatgatccagcagcaccaaaccggcctcagctggatgttcgccgtgcatatcattcagcagttcggcctcgggatcgccatcggcctcggcggcggctacctgctgctgcagatgattaaccgcatcgtgctgcccgccggcctctatccgctgctggcgctgagcggcgggatcatgatttttgccgtcaccacctccctcgacggcagcggtatcctcgccgtctatctctgcggctttctgctgggcaaccggccgatccgcaaccggcacggcatcctgcagaacttcgacggcctggcgtggctggcgcagatcgccatgttcctggtgctgggcctgctggtgacgccctccgacctgctgccgatcgctatcccggcactgctgctgtcgatgtggatgatattcattgcccggcccctgtcggtgtttgccggcctgctgccgtttcgcggctttaacctgcgcgaacgggtgtttatcagctgggttggcctgcgcggcgcggtgcccattattctcgcggtgttcccgatgatggccggcctggacaacgcccgcctgttcttcaatgtcgccttcttcgtggtgctggtgtcgctgctgctgcagggcacttcgctgtcgtgggcggcgaaaaaagccaaagtggtggtgccgcccatcagctggcccatctcccgcgtcgggctggatattcacccggaaaacccgtgggagcagtttgtctaccagctgggggccgataagtggtgcatcggcgcggcgctgcgcgacttgcacatgccaccggagacgcggattgccgcgctgtttcgcaacaatgtcctgctgcaccccaccggcagcacccgcctgcgggaaggcgatatcctgtgcgttattggtcgggagcacgacctgccggcgctcggcaaaatgttcagccagtcgccgccggtggcgctcgatcagcgctttttcggcgacttcattcttgatgctgaggcccgcttcgccgatgtggcgcaaatctacggtctcgacggcggtgaggagttccgcgagcatcagcagtcgctcggggaagtggtgcagcagctgctgggcgcggcgccggtggtgggcgaccaggtggagttcgccgggatggtgtggacggtagctgaaaaagagaacgatcacgtgctgaaggttggggtgcgggtcgcggaagacgaggcggagtgatccgccccggaataggttacagggtcacaactggcacccgcggcgccagggcgcacatcagctcatagccgacggtgccgctgctggccgccacgtcgtcgattttaatctctttgccccacagctcgaccggcgcgccgatcccggcctgcgggcagggcgttaaatcgaccgccagcatatccatcgatacgcgtcccacggtagtggtgcgtacgccatccaccagcaccggcgtgccgctcggcgccacccgcggatagccatcggcatagccgcaggcgacgatgccgatccgctgctcctgggtggtgcggtacaggccgccatagccaatcgcctcgccggggcgcaggttctgcacgccgatgatttcgctgcgcagcgtcatgaccggcttcagcccggtgttggcgatgtcctgccactgcccggaaggcgacgcgccatacagcacgatgcctggacgaacccagtcaaaatgcgcttccggatgccagagggtcgccgccgagttggccagcgagcgcgggcaatccagcccctccgccgcctgttcgatacggcgcatcggctcgacaattccctgcgggttctccgcctccgcgaagtgcgacatcagcgtcatctcgccgacgttgcttatcgcccgcagctgctgccagacggtgtggacccgctcaggcataaagcccagccggttcatgccgctgttcaccttgagatagatatccagcggcgcgcgcagcttcgcctgctgcagggccttaatctgccagttgctgtggacgctggtggttaaacgatattgatccagcaccgccagctcatcggcatggaagaagccctccagcagcaggatcgggcctttccagccctgctcgcgcagcaggatcgcctcttccaggttgagcaaggcgaaaccatccgccgcgcttaacgcactccatacgcgcgccacgccgtggccgtaggcgttggccttgaccaccgcccacaggcgcgacccgggggccgcgcgacgcactatctgtaaattctgccgcaaggccagcaggtcgatgctggccactaccggacgggtcatgcaagctccttagttgtgtgcgccgtgcaggtgctgcgggcgcgccggggtaaaaccggggctgtagcgggcaaccgccagatcgtcgtaagggatcgccggcgtgcggccggagatcagatcgctgataagctgcccggagccgcaggccatggtccagccaagcgtgccgtggccggtgttgagccacagatttttatacgctgtgcggccgaccaccggcgtgccgtccggcgtcatcggccgcaggcccgtccagaacgtcgcctgctccacgtggccgccgcgcgggaacagatcgcgcaccaccatctccagggtttcgcgacgcggctgcagcagcgctttgttaaaaccgacgatctccgccatgccgccgacccgaatgcgctgatcgaagcgggtgatggcgattttgtaagtctcatcaaggatagttgaaaccggcgcgccgtcctcctgagcgatcggaatagttaatgagtagcctttcagcgggtagaccggtatatccaccagccctttaagcatcgccgtcgagtaggagccgaaggccatcacataggcgtcgcccttaataatctcatcgccgcatttcaccccggcaatgcgatcgccctcgtgcagcagcgcatccactgcggtgttgaagcggaaggtcacgccggcctgttccgccattgccgccaaacgggtggtaaacagctggcagtcgccggtttcatcatttggcaggcgcaggccgccggtcagtttgtggctgacctccgccagcgccggctccacctccgccaaccgcttcgcttccagcagctgatacggcacgccggcgtcctccagcaccgcgatgtcgcgggtggcattttcatactgtttggcggtacggaacagctgcagcgtcccgccctggcgcccttcatactgaatgccggtggtgtcgcgcagcgccttcaggcagtcgcggctgtactccgccaggcgcaccatacggcctttgttctccatatagtggcgggtgtcgcagttgcgcagcatctgccacatccacttcaactggaacgaggtgccgtcaagaccgatcgccagcggcgcatggcgctgaaacatccatttgatcgccttcagcggcacccccggcgccgcccagggcgccgcatagccgggagaaatctgcccggcgttggccgcgctggtctcctctgccggaccgggctgacggtcgatgaccgtcacgtcatgacccgcctgactcaaataccacgcgctggctaccccaaccaccccacttcccagtatgacgacacgcatagcgactccgtaacagttaaagaacaatcatctaattacaaattgataactcagttgaaaatattattcaacatacgctttatttatggtgacttaactcacagcaaaccgcaccagccctgcgctgtgagatttacgatctcatgctgcgctttatttttacccagcattaaattctgcaaacaaggcaaaaaaacggctttgagatggggaaatcgcgaagaaaagcgattggcgtacagcacagtttgctgcaccgtgttctatgcttgtttagaggttttccgttcagagaaaaccaacaacaacgagggcgcgctaatggctacgattgactccatgaacagggacaccacccgtttaagcgatggacccgactggacgttcgagttactggaaacctacctggccgaagtggaccgggtcgccaagctctatcgtcttgacacctacccgcaccagatcgaagtcattacttccgagcaaatgatggacgcctactccagcgtcggcatgcccatcaactatccgcactggtcgtttggcaaaaaatttattgagaccgagcaggcctataagcacggtcagcagggtctggcgtatgagatagtcatcaactccaacccctgtatcgcctacctgatggaggaaaacaccatcaccatgcaggcgctggtgatggcccatgcctgctacgggcataactcgttttttaaaaataactatctgtttcgcagctggaccgacgccagctcgatcatcgactatctgatctttgcccgtaagtacatcaccgagtgcgaagagcgctatggcgtcgacgaagtagagaaactgctcgactcctgccacgcgctgatgaactacggcgtcgaccgctataaacgtccgcaaaaaatctctctgcaggaggagaaagcgcggcagaaaagccgggaagagtatctgcaaagccaggtgaatatgctgtggcgcaccctgccgaagcgcgaggaagaaaaagcgattgaatccgctcgtcgctacccttccgaaccgcaggagaacctgctgtactttatggagaagaacgccccgctgctcgaaccgtggcagcgcgagatcctgcgcatcgtgcgtaaagtcagccagtatttctacccgcagaaacagacccaggtgatgaacgaggggtgggccaccttctggcactacaccatcctcaaccatctctacgatgaagggaaagtgactgagcgctttatgctggagtttctccacagccataccaacgtggtgttccagccgccgtacaacagtccgtggtacagcgggattaacccctacgcgctgggcttcgccatgttccaggacatcaagcgcatctgtcagtcgcccacggaagaggataagtactggttccccgatatcgccggttctgactggctggaaacgctgcatttcgccatgcgcgactttaaggatgaaagctttatcagtcagttcctgtcgccgaagatcatgcgcgatttccgcttctttaccgtgctcgacgacgatcacaacaattatctggagatctcggcgattcacaacgaagagggttatcgcgagatccgcaataagctctccgcgcagtataacctcagcaatcttgagccgaatatccaggtgtggaacgttgacctgcgcggcgaccgatcgctgaccttgcgctatgtgccgcacaaccgcgtcccgctggacaaaggccggcgcgaagtgctgaagcatgtgcatcgtctgtgggggttcgatgtgctgctggagcaacagaacgccgacggcagcattgagctgttggaccgctgcccggcgcggccgaacgcgctatagcattgcggggcgagtaaaataacaaagggggccattggcccccttgttctgtatatcgatcgcgaaaagcccgcttaacgcatattcatggctaaatcaccgggcagcgatttctgcatccggtgccagatctcgccgctgtcatggccgtagcgacgaaccagctcgtaaacctggtcatgcaggccagcctcacacactttcgccagctgatgatagaaaccgagcgccaggctgcgcgcttccgggctggagaaatagtggcggccgatgcgggtatacaaccccttcatgccgttgaggatcagaccgtagatcgggttgccggaggcaaacgccagaccacggaaaatattataatcaagctcggcgaaggcgtcggcgtgatcctccacctcccgggcgctgtccaggaccgccagcgctttatccggatgctggcgaaacgcggtgcggataaaaatcgtggaaatgttggtgcgcacggagagcagattatcaatcaactgcggtacgctgtcgtgatcgaggcgcgccagcgtttcgaggatattcaggccggaggtttcccaaaagttattcactttagtgggcttaccatgctgaatggtcagccagccgtcacgggccagacgctgcaatacttcgcgcagggttgtgcgggtgacaccaatcagctcagaaagctcgcgttcagcggggagaatcgatccgggagggaagcggttattccagatactctcaatgatgtactcttccgcgaaacccgcagggctctgcgccttaatgaccatagtaagatttccattacacagcgttacaattgcactcatcataccagagccgctatagcgcagatagcatggcaagtgaattaaaaagggatcgccgtttcattttccgcttttactttgcgcttttccttatcttcacaaaccgccagcgcggcgcgaagaaagttgcttctcattttgctcaactggtactcttgccaatcgttatgcacaaaaccatgcactcattgacggggaaggattctgtcgtggaaatttcttatggccgcgcgctgtggcgcaattttcttggccagtcgccggactggtacaagctggcattaatcattttcttaatcgtaaatccgctggtgttcgccgtggcgccgtttgtcgccggctggctgctggtggtcgagtttatctttaccctcgccatggcgctgaagtgctatccgctgctgccgggtggtctgctggctatcgaggcgctgctgatcggcatgaccagcccggcgcacgtccgggaagagatcgccggcaatctggaggtgctgctcctgctgatgttcatggtggcgggtatctactttatgaaacagcttttgctgttcgtgtttacgcgcctgctgctggggatccgcagcaaaatgctgctatcgctggccttctgcctggcggcagccttcctctcggcctttctcgatgcgctgacggtggtggcggtagtgatcagcgtcgccgtcgggttctacggcatctatcaccgcgtcgcctcggcgcgcccggacgatagcgacctgctcgatgacagccatatcgagcagcactaccgtgaggtgctggagcagttccgcggctttctgcgcagcctgatgatgcacgccggcgtcgggaccgcgctcggcggcgtcatgaccatggtcggcgagccgcaaaacttgattatcgccaaagccgcgggctggcattttggcgagttctttcttcgcatggcgcccgtgaccctgccggtgatggtctgcggtctgttaacctgtctgctggtcgaaaagtatcgcctgtttggctacggcgaaccgctaccgccgacggtgcgcaaggtgctgcaggagtttgacgatcgcagccgcgcccagcgcagccgtcaggagcgactgcggctgattgcccaggcgctcattggcgtttggctgatcgtggccctggcttttcacctggctgaggtcggcctgattggcctgtcggtgatcatcctcgccaccacctttaccggcgttaccgatgagcacgccattggcaaggcgttcaccgaggcgctgccctttaccgcgctgctgacggtcttcttctccatcgtcgcggttatcatcgatcagcagctgttcacgccggtgatcgagtttgtcctgcaggcctcgccgcacgcgcagctgtcgctgttttatctgttcaacggcctgctgtcgtccatttcggataacgtgtttgtcggcacggtctacatcaacgaagcgaaagcggcgctcgaacatggcgccatcagcctgccccagtttgagatgctggcggtagcgatcaacaccggcaccaacctgccctcggtggccactccgaacggccaggcggcgtttctcttcctgctgacttccgccctggcgccgcttattaggctctcctatggccgtatggtgtggatggcgctgccctacaccatcgtactgacgctggtcggcctgttatgcgtcgagttcaccctgatgccagtcaccgactggctgctggcgcacggctggctggtgacgcccagcctaccctgagtcagtttttgcccgggttcgcccgggcgcatcaataacccgttacggaatattttccgccgcgcctctggcgtcggttcggttttcgtttacactgccatgatttagcatcttccagggaaatgattatgttgcaatatttaaaccagtgctcaagaggacgcggtgcctggctcctgatggcgttgaccgcttttattctcgaacttgtcgcgctgtggttccagcacgtgatgctgctgcagccgtgtgtcatgtgtatttacgaacgctgcgcgctgttcggcatcatgggcgcgggactggtgggcgctatcgcccccaaaacgccgctgcgctatgtcgccatggcaatctggttgtacagcgcgatacgcggactacagctggcgtgggagcatacgatgctccagctgcacccttcaccgttccagacctgcgatttcgccgcccgcttcccaacctggctgccgctggataaatggctgccgcaggttttcgttgcgtccggagactgctcagtacgtcagtggcagttcctgtcgctggagatgccgcaatggctggtggggattttcgccgcctatctgctggtcgctattctggtgatcgttgctcagcctttcaaagcgaaaaaacgcgatctgtttggtcgttaagccgcggcgagtacagcccacaatgaaacgccctgcggggcgtttttttatgcctcctgcgcatcgctgaatcgtttcccgtctatggttgacctctatggttgaccatagccattaaaaggtgcatattaaatacatcttttaaaaccccacaggagctcacatgtcatctttactgatccccgcagactggaaagttaaacgctccaccccattctttaccaaagagaatgtccctgccgccctgctgagccaccacaacaccgcggctggcgtcttcggccagctgtgcgtcatggagggaacggtgacctattacggttttgccaatgaacaggcgacggagccggagaaaaaagtcgtgattcatgccgggcagtttgctaccagtccgccgcagtactggcaccgcgtcgaactcagtgacgacgcccgcttcaatattcacttctgggtggcggaagaaaccgacggtgaaaacgggctgttccacgcgaagaaagcgtgacggcgcttagcgcgccctgtcaggcagattaaggatatggtcctgccagtcgaccaccgtggactcaggcaccgcaatatggcgaacggagatgcgttcgccgtgcatcgccgcttttgagccagtcagcagcgggtgccaggccggcagaggcttgccttccgccagcaggcgataggcacaggtcggcggcagccattcgaaggtcggcagattttcgcgggtaagcttgatgcagtccggctcatactcaaagcgacgcgcgtagttacgacactggcaggttttgatattgagctgacgacaggcgacgttggtgaagtagatctcgtcagtgtcttcatccatcagcttgtgcaggcagcactggccgcagccgtcacacagcgattcccactccgcgtcgctcatgtcatccagtgttttttgttgccagaaaggttgttcgctcatcggagtgtccgtcgttgccagttaagggtgcaccttataaccagtctggcacgccgatgcaagttttgccgccccaaaaggcggcaaatagcgcttacagcacgcgggtagtgagcgccaggccgttgaagccgacctccagctcgtcaccgctgtgcagcggccccacgccttccggggtgccggtgagtatcacatccccggctttgagggtaaagaagcgcgacatataggcgatcagcggcacaatcctatggatcatgtcggcagtggtgccctgctggcgcacttcgccattaatcttcaggcttaacgacgtattctgcgggtcgccgtggaactcagcggccgggataaagccggagatcggacaggcgttatcgaagcctttggccttctcccagggttgtcccgcttttttcattttcgcctgcaggtcgcgcagcgtgagatccagcgcgacgccatagccggcaatccctttcagcacatgctcttccgtcgcctgacgcagcgtgctgccgataagcaccgccagctcgacttcgtgatgcaccgagcccagcccctcagggagcaccaacggctgacgaagatcgcacagcgcagtctcaggtttaataaacagcaccggctcttccggcgtcgcactgcccatttccttgatgtgtttcgcataattactgccgacgcaaaccactttgcttactggataatccagaagcgcaccctgccagttatgatgttggtacattattttccctcgtgggttaatcggattgtttcccctgttccgccaggtgtttctttagtagattttcagacggcggaggcagttgcaggtaatagccctgttcgcttaacgcctgtttcactttttccagatcggcgttaaccagttttttgcgcccatccagcggcagcagcatcgccatttgcggcgtgccaaagctgcgcattagctcgtcaggaacgcgcgagaaatcgtcctttttttcgacgtataaataggtttgttcacgtttagtacttcgatagatcacacaaaacatagttttactcggaattagacccgtggtcacttgcctcaatatatgagtgactataacatgccttttagtcttcggaatatcaccgcacttcggcggttgataaacagcaaattgagtaaggccaggatgtcaaatacgccaatcgaacttaaaggcagtagcttcacgttatctgtcgttcatttgcacgatgcaaatcccgaggttattcgtcaggcgttagaagacaaaatcgcccaggctcccgcttttttacgtcatgctccggtggtggtgaatatcgccagcatcgaggaggaggtggaatggcgcgccatcaacgaggctatcgccgcgaccggtttacgtattatgggcgttagcggatgcaaaattccgcgcctgaaaaccgaaatcgaccgcgccggcatcccgttattaaccgaagggaaagaaaaagcctctcgtccggcaccgtccgaacccaccccgccgccgccagttgctagtcagatcacaaaaacgcgtttgattgatcagccggtacgttccggtcagcgcatttatgcgccacactgtgatcttattgttacaaatcatgtgagtgccggtgcggaacttatcgctgacggaaatatccatgtatatggcatgatgcgaggacgtgcgctggcaggcgccggtggcgacagagacgcccagatattttgtacccaccttgcggcggagctggtctccatcgccggggaatattggctgagcgataacatcccggccgaattttatggcaaagcggcgcgcctgcgtttaggtgaaagcgctttggcaattcaaccgttaaattaatccctttttaacaaggaatttctatggcacgcattattgttgtgacttcgggtaaagggggcgttggcaagaccacctccagcgcggccatcgctacaggtttggcccagaagggaaagaaaaccgtcgttatcgacttcgacatcggcctgcgtaacctcgacctgattatgggctgcgaacgtcgcgtcgtttatgatttcgtcaacgtcattcagggcgatgccacactgaaccaggcgctgattaaagataagcgcacggaaaacctctacattctcccggcttcccagacccgggataaagacgctctgactcgcgaaggcgtcgacaaggttctcgaagaactgaagaaaatggaattcgatttcatcgtctgtgattccccggcaggcattgaaaccggtgcgctgatggcgctttactttgctgatgaagccatcatcaccactaacccggaagtctcctccgttcgcgactccgaccgtatccttggcattctcgcctctaaatcccgccgcgcggaaaatggcgaagagccaatcaaagagcatctgctgctgacccgctacaatccaggccgcgttaataaaggcgatatgctgagcatggaagacgtgctggaaattctgcgcatcaacctggtaggcgtgatcccggaagaccagtcagtcctgcgcgcatccaaccagggtgagccggtgatcctcgatgccgcctcggacgcaggcaaagcctatgccgataccgttgaacgtctgctcggagaagaacgccctttccgcttcattgaagaagagaagaaaggattcctcaaacgcctgttcggaggataaattatggctttactcgacttttttctctcgcgaaaaaagaacacggctaatattgcgaaagaacgcctgcaaatcatcgtcgccgagcgccgccgcggagacgcggagccgcattacctgccgcagttacgcaaagatatcctggaagtgatctgtaaatacgtacagatcgacccggagatggtcagcgtgcagctggagcagcgggacggggatatatccattcttgagctgaacgtgaccctacccgaaacggaagagtcgaaatcctgacctgtcgcgctatcgcgaaaaaaaaccggctacgccacgcgccgccggttttttaatggtctgaacctggccgcgaactagcgcggatagtcgtttaacagcctcttcagccgctcggccattagctccccgcgccaaccggaaatcagctcaggttcaccggcttgcgttttcagctgccagtgccagttcagcagctggttgatctgccgacgcgacgccagcagctccgcgcttacgcccttctccgtgctcacttcctgcaccagcgctttaatatctttaaaggctttgcggtagcccggcatgtcgatcaggttctgcagcggcgctggcagggccgactccggcagcgcctgcgctttttcgaccaggctaatcagcgttttgccgtggaagcgaatttcgctaccggacaacccgaggctgtcgagctcgcccaggctggtgggcatatagcgcgccacgctccacagatgctcttcccgcaccacaaagtttaccgccaggtcgcgctcgcgcgctttgcgcaggcgccactccgccaacagctgcagacaacccagctggcgggtacgcagctgccaggcgttgccgatatcgcgccaggcctcggccgggtcgaccacctcctgacgacgctgctgcatcacgcggcactcgtcgagcgccgccggcagccagccagcgcgatcggtctccgccattaactggctggcgatcggcagcagataccagacgtcggccgcggcatattcacactgacgctcagtcagcgggcgcgccagccagtcggtgcgggattcgcttttatccagcgctaccccggaatactcttccaccatcgaggcgaagccccaggacattgggcggccgcagaaggccgccaggatctgggtgtcaatcagcggctgcggcatcaggttaaatgcattaaggaagacttctaaatcttcgctgccggcatgcaggtatttagtcacatcctggttgagcagcaggtcgcgcatcggcgcccagtcgttaatcgtcaagggatcgatcagagagacctgctggccgtcgaacagctgcagcaggcccagctgcgggtaataggtgcgggtgcggacaaattccgtatccagagcgacggcggaggccgtgcttgccgcttcgcagacagcgcgcaggccatcgtcggtggtgatcatctgatagttcaaagcatactctcttaacttgcgcccataaaaaacgccggcgtagccggcgtcaggcgactcattcgttacttagcctttattgtccactttagcgcgcgcttcgtcacgcagttctcgccgcaaaattttcccgacgttggatttcggcagttcgtcacggaattccaccagcttcggcaccttgtatccggtcaaatggcgacggcagaacgtaatcagcgcctcttcggttaacgcagcatctttcttgactacgaaaatcttcaccgcttcgccgctgctgccggacggcacgccgatggccgccacttccagcaccccgctatgctgcatgaccacatcttcgatttcgttcggatagacgttaaaacccgacaccaggatcatatcttttttgcgatcgacgatgcgcaggaacccctcttcatccatcaccgcgatatccccggtgtgcagccagccgtctttgataatctcatccgtcgcgtcagggcgctgccagtagcccagcatcacctgcggccctttaatacagagctcgcccggctgacccggcgccacttcgttatcatcatcatccaccagtttggcttcggtggagggcaccggcaggccaatgctgccgctgtggtagtcaatatcgtgcgggttaacgctgaccagcggggaacactctgtcaggccgtagccctccagcagatattgcccggtcagttttacccagcgctcggccaccgcctgctgcaccggcatcccaccgccggcggacaaatgcagcgaggagaaatcaagctgctggaactctttgttgttcagcaaggcgttgaacagggtattgaccccggtcatggcggtaaaaggatacttcgccagctccttcaccagcccggggatatcacgtgggttggtgatcagcaaattttgcccgcccagttcgataaacagcaggcagttcatggtcagggcgaaaatgtgatacagcggcagcgcggtcaccacgaactctttgccgcgatgcagcagcgggccgtaggtggcattgacctgctcgaggttagccagcatattgcggtgggttagcatcgcacctttggccacgccggtggtgcccccggtgtactgcagaaacgccagatcttccgcaacgatctccggcttgacgtactgcatgcgatagccgtgctgcaacgcgctgcgaaacgagatggcgtccggcagatggtacttcggcaccaggcgcttaatgtacttgaccacaaagttcaccagcgtacctttggcggtggaaagctggtcgcccatgcgcgtcaggatcacatgctggacctgagttttcgccaccactttttccagggtatgggcaaagttggagactatgacgatcgccgccgcgccgctgtcgttgagctgatgctccagttcgcgcggggtatataaggggttgacgttaaccacgatcatcccggcgcgcaggatgccaaacagagccaccggatactgcagcaggttaggcatcatcagggccacgcgatcgcccttctgtaaccccaacccctcctgaagataagcggcgaaggcgcgactacgctcctccagcttacggtaggtcatcacttcacccatattgataaacgccggttggtcggcgtaacgggtggtggcatgttcaaacagttcaaccagggattgatagcggtcaggatttatctccgccggaacatctgcgggataacggtttagccaaacctttttcactgcatcacctctgaaatagttattcgtcgtcatcacagcccctggataatacattttgttaacattatattaactcagcgtaccagtttattaattaggcaatgagcaggttgcgaagcgcgtcactattttttttcttattcgactgaaaacaaagaaacagcggaccggccgctgtttctttgaactaacataaacaacaaaatcattcggttacaacgtttctcacctcagcagggccgggattgtaccagccccagccgccatagccgtagccccaggggcgcggacccagcatccacgggtcgataggttgcggaggcatcaccacctgctgtactacgttccagcgcttgtagccggtggcgttcattagcataaatttatacggcgtgctgcccaccttgccgtcaaccaccccggcgatcggtccgaccacggtcactagttgaccgcggaaatccaccggatcgaggaagccattgacgtcagcaaaaatccttccgcgggacggctcgcccagcactggccgcgcgccgctgtccagcggtacggtggcgatttctaagcgggttttcccctgctggttttgcacattgaccaccttaccgccaaagcgcgcttcctggccaacgtacagctgcggggcgttcatcacccgcaccaaatcctgctgcggcgtcgggctggtgcctttgatggcatccggcaccgatacgcagccgcttagcgcaacggcaatcgctgcggccagcagccagcgaacgccctgtttttgacccgccatgatgcgactccttttctcagtcttcttgttactgagattcactcgcggcctggaagtttcttccacgccacctcgtttcgcaaataaaccggctccgctttctccacggccacggttttccccgccgccagcaggtaacaggctaacggcagcatatcctccgccgccggcaattcaatttcgccgctgcttaaggtcagtccgctcgctttcgccagatccggccacgcctgccagccggtgccgacggtggcccattcgccggaaagctgtgccagtcgttcagctaccgcgtccggtttgagcaccgcttccgtctcttcgccatgccagacgccctgctcgtcgcgctggtactcggcccagtagacttcgcccatacgcgcatcaatggccgccagcacacgggtggcgccggttttgcgccaggcgccctgcgccatggtggccagcgtggaaacgccaatcattggcagttcggcgcccagcgccagcccctgggcgataccgatgccgatgcgcacgccggtaaagctgcccggaccgcggccaaaggccagcgcgtccagctcgctcagggtggtgccgctctcggtgaggacctcctgcaccagcggcaggatacgttgggtatgttcgcggggacaaatttcgaaatgagcactaagggtgccatcattccacagcgctgcggagcaggcctctgtggcggtatcgatagccaaaattcgcatgggtggtcacgctctcgttacatagttcaggccttcaggcagcctgatttccggcaaacggcaaacccgccgccatgccgcccgaagtctattgggaaccgctaattaacaaaatggcgcgcagcttaacacattttagtgcggattaccttgccggcggtacggcgagaaagcgcaccgcccgacggatatcgcgggttcgcggcgccggcggcagactggccaggaacaccgcgccgtaggggcgcatcaccagccggttgtcgcagatcaccagcaccccgcgatcgtcgatatcgcggatcaggcgacccaccccctgcttgagggtgatcaccgcatccgggagctgcacttcatcgaagggatcgccgccgcgcagccggcaatcttccatccgcgcttttagcagcggatcgtccggcgaggtgaacggtagcttatcgataatcaccagcgacagcgcgtcgccgcgcacatcgactccctcccagaagctgctggtagccaccagcagcgcgttgccggcgctgacgaactgctgcagcagttggcctttactggtctcgccctgcagcagcaccggtagcgtcatggtggcgcggaactgctccgccagatcgcgcatcatggcgtgcgaggtgcacaacataaagcagcgaccatcgttggcctcgatcagcggcttgagcatcgccgccaggtgtcgcgccgcgccgggctggttcggcaggggtaggttgcgcggcacgcagagcagcgcctggtgctgatagtcaaagggactcggcagcagcagagtctgcgcctcgtcgatccccagccgggcggtaaagtggtgcagatcgtcgttcaccgacagcgtcgccgaggtaaagatccagctccccgacttctgcgccatcacctctttaaacttctcggccacggtcagcggcgtcagcgcgagagtaaagtggcgcgaggtacactcataccagtagctgtagcccggctggttgatctctttcaaccgcttcaggcgcccgcgatagagggtggcgcgctcaaaagcggcgtcgagcagcgccgagcgacccagcgaaagtttggcgacgtcatagcatagctcgagcgcgtcatcgagcagcagcagcgctcgctgaatgtggctgtccgccagcagctcgcgcagattgccgcggtagcccgggtctcccagctgcaggcggaaatcctgcgcgctttgcgccaggcggtcggcgcatttttgcagctgctgagtgtctttcagttcggtgcggtaggcaatggtgatgtctttcgccaggtccagcagctggcggctggagagcgactggccaaagtactgactggcgatatccggcagctgatgggcttcatcgaagatcatcacttccgcctcggggatcagctcggcaaagccgctctctttgaccaccatatcggccagaaacaggtgatggttgaccaccaccacgtcggcgtccatcgcttttttacgcgccttcaccacgaagcaatctttatacagtgggcagtcgctaccgagacagttatcgttggtgctggtcaccagcggccaggcctgagagtcttccgcgacgctggcgcaggtgctgatatcgccatcctgggtttgattcgaccaggagcgcaggaggatcacatcgctgagggtttgcaccggcagatcgccgcccgccagcgcctgctgctcaagacgttcgagacacaggtagttggagcgccctttgagcagcgccagtttcccggtgaatttgagcgctttggcgacggtgggcagatcgcggctgtaaagctgatcctgcagcgctttcgagccggtggagataatcaccttttttttcgcccgcagcgcaggcgccaggtaagcgtaggttttaccggttccggtccccgcttccaccaccagcggccgggaggcctcaatcgcttcgctgaccgccaccgccatctggcgctgcggctcgcgcggtttaaatcccggtatggctttggctagctggccgtctgctgcaaaatcgtcgatcacattgccccctggttatttggacagtgattatgtcagggaggacggcgtttcgccagtccgggtagtgacgcgagcggcacattatggcagtcttgccgcagccgaatggaatgcttaaagaggaaaaagcaatgacaattacgcgtattgatgccgaagcccgttggtcagacgtggtgatccacaaccagaccctgtactacaccggcgtgccggcaaatctcgatgccgacgctttcgagcagaccgccaataccctggcgcagattgacgcggtgctggaaaaacagggcagcgacaagtcgcgtattcttgacgccaccatcttcctcgccgataaaagcgactttgcggcgatgaataaagcctgggacgcgtgggtggtggctggtcacgccccggtgcgctgcacggtggaagcgacgctgatgaacccgcagtataaagttgagatcaaaattatcgccgcggtgtaactcgttataccgtgcctcccgaggtcggcgagacacggtatctgtaggccggataaggcggcacgccgccatccggcaacgtgcacctaatgcctgatggcgctgcgcttatcaggcctacaaacccggacaccacatcagctgttccttcaactgcagcgtctcctgcggcaggcatttcagcacatcgcgatagctggcggattgttttgcataaccacgggctgactgcagcagcacccgcagcgcactatcccacacaatgccctgcaggtcactgtacggccagagatcgggttcacggataaacggcaccaggtaatctatcccctgcttcactcctcgcccgtcgcggatggtgttccagcgatcgaattcgacatgctcggcatagcgattcagcagcagatgcgcctccagattaaacagcgagtaatggaaaggaatggtgcgctcaagctccatggtctgcttgccatcctggtcaatctgcgccgccattcgctgggtgatcccctgcgcaatgatccgcgccgccagtcctttatcgccgtagaatagcgcgttaaccgtccgctgggcgtcgtaccaggtgccgtggttgttgtgccagacatactctgaatggccgatttcgctgtagtacatccagtggttaaaatcccggaaccactggtgcaggccgataatatcgtcggtatccagcacgttcgccgggctaatcaagccgatggtatcgaccaccatccacattaatcgggtatctatcagcccggtgccgcgaccggagacaatccccgggattgcctgaccatagttcagatgcgggttcattcgcgtctctggatccaggaaccaacagcggatctgcgcggccgccgcctgggcatagtggcgctgaccagtgaagtaccacgccagccccagggtcaggcagcgttcgcacatgcggataatgcgcgaggtgtcggtatcgttattttcacactgcggattgatatgtccgtcgcggcgaatatacggcagcccgttgggacgccgagggttcggccaccagtaggtccccaggctgtagtaatcgtgcgcgtcgccgctcgccggccgcagttttttatgcacaacgctttccggcgcttcacgacgcagaatatcggcctgcgaaaccagcttgctcagcgccagctgcagcggcgagaacggctgttttaatcccgcacgcgcgttttccagacagctttcgtcaagggtgtacagcttcatcgccacgtcagacgccctcccggcaggctatacgttgaccgctttgcgcatcgaacagatgcacaccagaaagcttcggctgcagccagatgctgtcgccctctttcaccgccagtcgctgtttaaataccgaagtaaacgccccgccgccggtatcgcagaacaactgcatatccgaaccggtgttctctaccgccgtgaccttcgccgccagcgcatcatcgtgggcctcatgcaccacgttgacctgctcagggcgaatggcatacaccacctgttgaccattggtgaccgctaaccccgcaggtaatgccagaagcgaaccatctttcagccgcagactggtcgcgtctccgttcaatacgacctcgccgggcagctggttaatctccggcgaaccaataaacccggcaacgaacaggttcgccggctggtcgtacagctccagtggggtacccgcctgctcgatgcgcccatcgcgcaggaccacaatcatctgccccatggtcatggcttcgatctgatcgtgggtgacgtataccgaggtggttttcagccggcgatgcagttcgcggatctctccccgcacctgggtgcgcagcttggcgtcgaggttggatagcggttcatcaaacaaaaacacctgcggtttacgcacgatggcacgtcccatcgccacgcgctgccgctggccgccggagagatcctttggtaagcgctccagcaggggatccagccccagcagcgcagcggcttcattcaccttctggttaatctccgctttcggcaacttagccatcttgagcgcaaagcccatattttcccgcaccgtcatctgcggatagagggcgtagctctggaacaccatggcaatgtcgcgcagcttcggctcgacgtcggtaacattgcgttcattgatatgtacttccccgccggaaatctcctccaggccggcaatcatgcgcagcagcgtcgacttgccgcagccgctgggcccgacaagcacgcagaactcgccgtccggaatggtcagcgacacatcctttatcacgtgcgcatcaccatacgatttacgtacgctattcagtacaacagatcccatgggtaactccttatcctttgaccgcgccggacataatcccgcgattgaaatgtttttgcagaccgagatagacgatgatgctgggcagcatcgccagcagcgtaatggcgataaaaatgtttggcgtgatgctctcgtcggtacgcagcgtgccgaggatcaccggaatggtgttcaggctgtcgtggttgaccacaatcagcggcagcaggtactggtcccaaatcataatgaagccgaaggtgactaccgtgccaagcgccggtttcaccagcggcaggatcacgtgaaagaaaatctgccattcgttggcgccatcaatgcgcgccgcctcttccagctctttcgggatcgccgacataaattccgtgagcacaaagatggaaaacgcccagccaacgaccggcagtatcatcccgagatagctgttgtagagtgaggcatcgatcagcggcagccgccagttgatgatcatgtacagcgggatcgcaatcacctcttccggcagcatcatggtcgacaaaataaccagactgaccagcgccacgccgcgaaacttcttacgggccagggcatacgccgccagcgcgctgaccgacacctgcaaaacggtgccgaagaacaccaccaggatggagttcaacagatactgccagacaccgatatcccgccaggcgaagatgaaattttcaaacgagaactgattcggccaggccagcagctcacccggtttcaccggcgcaccgctgaatgccgtggcgacgatgccccagaacggtccgacaaaaacgatcagcagcagcgcgtagatgcaccagcgccctgcggtatcccaacgttgacttaacatcgcggctccttagtaacgtgcaatacgttttttcagcgtcagatgacagatggttaagaaaaccgtgaaggcgaacagcagaaacgacaccgccgacgcgtagccatagtcaaactgctcaaaccccagtttgtagatatgggtcatgaccatttccgtcgcgttagatggcccgccgccggtggtggcgtacacctcggcaaacacgcggaaaccgcggataaaggagagcatcagcaccaccgagagcgccgggatcatgccgggcagcgtgacgtagcgcagacggttccaccagttagcgccgtcgacgttcgccgcatcgtataaatcgcggctgatccccgccagaccggcaataaagatcaccatgttgtaaggcaccgctttccagatgtgcagcagcatgatgacccacagcgcctggtcggaactggcaagaaagccctggtcggcgacgccaaaccagctgagaatgtggttaaccacgccgttgggcgtcgggttgaataaaatacgccacatttcggcgacgatcgccgcgctggtgacggcgggtaaaaagatggcggtgcgaataaaacgcaggtggcgcgccgggccttccagcagcatcgcgaggaagaacgccaggatagccgcagcgaacatcgtgactaccacatacagcagcgtattcaccaccgccgcgtgcagctcgacgtcggcaaacgcacgggtaaagttatcgagtcctacccattcgttcggctgattaaagttgaccttgtaaaagctcatcaccagaccctgaatcatcgggatgaacttaaaccagctaaaaataattaacgcaggcgctaaaaacaaccacgggatcagcgcccgcttacgctttgcgctcagccatccgatcgagtcaggcgacgcggcctgcttcatcggagaggacttcgtctcatgcagcgtcatcacggttgtcctcagttagccagcacattttgttttttcagctcagcgttcaccttgccgtcgatactctccagctcgccggcgatcgggctgttgcagtcggcaaaaatacggttaaagccctcggcggccacctgacgcaccggcgtccagttgggaatttgcggcacatagcgtccctgttgattgtaaagcctggcgaaagtctcccagcgggcgtcctgatagacggctttgacgtcgacgttcttattcaccggcaggcgcaccaccggaatatgctggctgcctttacccatgccgatttcctgaccttccgccgagatcataaattcgataaatttacgcgcggcgtctttttgtttgctgctcttcatcataaagaccgtggtgccctccgcgagcgtggcctcaccttttggccctgctaccggaaccacttcaaaattgtctttacccgggtctttatcaaacagcgcgatatggtacgggccgctaaagaacatgccgctttgcccggagcggaaagacgggatgacgtcggcggtggtggcattgatcgcccccggctgggtgactttttcgcacatcatggtgcgtataaaggtcatcgcctgaaccacttctggcgtattgagcgccgcgcggaatttgccgccctcttctttgacgaaatcccctcccgcctgccagataaagctgctcataaaccagctggcgtagccgcgcgtcgtggaggcggggacgataaagccgtaggtatcgtttttaccgttgccgtcaggatcctgggtggtaaaggctttcgccagggtctgaatatcttcccagcttttaggctgtggcagccccagcttttcccgccagtctttgcgtataaacagggcgaaggtttgggcggaggtcggcacaccgtagtacttaccgtcgatatagcgggtactcttccatgcggttgggaagagctggtcgccgccggagatcgactgcggatctatttcctcagcaatacccaactggataaactgccccagcgaagccgcgtcgttaaaaatcagatcgggcaaagcgttacccgccgtggcgcgcgccaggcgctgttcaaagtcagtagtggcgttgaagtactcaattttgataccggtttttgcttcaaatttctccgcctcttgcttgtatatatttttcgagtcgttgctggcgcggatccagacgttgagggtcgtggcggcatagctttggctcacgccgagtccaagcgcggtgagtagtaataatgagcggaatttattcgcagacatgattgcatatcctttattgttggacacaaaggtaattaaattctcaattaatacgcaggaattaatttgaatatcgctcaggcgttaaaacagctgacgcaagaaatatttccattcattagatagaaacacacccatcaatacaaccacagtaaaaagaaattgcgtttcaaaaacaaaaaagttgaatcagatcacatggaaaagtgacaatgaaagttacaccgaaaaaatatacattaaaatcaattaattataaatttaccatttttattgaaacaatcaaaaaatatagaaaaacgctgaattccgtgatgtgcataacattaaaaaggtcattatcaatcgatagcgataaatttgatgtgcgtcacacaaaaaataactttgtcttttacactgctcgccactgtatattcaaatatattctttttaattaaaccgcctgttttacgcgttatttaaatacgcgacaggcttaaatccgttgttatcttttctcacacttgcagaagggttatcaccatgaacgcaatacctcgccgaggttggttatgcgttgcgctattttgttccagccttagcgcttctctgcatgccgccgagccgtacacgctggacgaaaaggatttagcctttagccgccagcagattgccgccaaagatccgttgtttgttctggcgcaggcggccttgctaaaaaaagccgatctggcgctcacgcatccgctgcgctcagtgatggacaaaacgcttgttgccgccagcggcaacaagcacgactactatagtttccccccttactggtggccgaatcccgataccaaagacgggctgccgtatatccgcaaagatgggcaaaccaacccggacgccaatagcgatgccaccgataaaaaccgcctggtgaagatgagtcaggatgtatcaaccctggcgctggcatggtacttctcccacgacgctcgctacgctcaaaaagcggcagcccagttgaagacctggtttctcgacccacagacgcgtatgaaccccaatctgcaatacgcccaagccattcccggcattaacaacgggcgcggtatcggcattattgatagccgggcgctggttgaggtggtggatgctatcgccctgctgcaatcctctgcggtgcttagcgagaaggacgtgagtgcgttgaagcagtggtttggcgagtattatcactggatgaccaccagccagaacggtttcgaagaagataactggcacaacaaccacggcagctattttgacatgcaggccgtcaccttcgccctgtttagcggcaaaaccgacgaggcgaaacagcgcctgtatctcacccagctacggcgcattgccggtcaatttgatatcgaaggccgtcagatggccgagctggagcgtacgcggccctggcactacagtaatttcaaccttgaagcctacaaccgcctcgggcgactgggcgagaaagcgggcgtcgatatctggaacttcacccttgatgaccatagtctgcgcaaaggctatcagtacatcgccggatttattaacagcgataccccatggccatggaaagacatcgataacatggatgaccaaaaagcactgcgcaatatcgccactgccgcccacgcctggccggaagatccgctgttccgtaacaaagcgcagtggctacgggcgaaataccccgacgatatcaccactcttatcgccccgcttttaccatcctcagaggtcagggaaaaccgctaatgaaacaatttactgggctctggcccaatattgtcgaacgtgccgcagcccataacgggctgctcgaacggctcgtgaaggatgcacagccggtactacatgccgcattacgcattccgcagaccgggattgccagctggaatctctactacttttgcccgcaccacggcgtacgattaacgtggcgagcggacatgccccaccagcatgcctgcccggtcgataatgaaatttttcgcggcgaaccgtgggacagcgcgtggtggcgcgaaatgaacgggcgtaatgccagcgcatgccagcagctcggcctgctatggcaactgaccggtgagagagcctggcgcgataaagtacgcgccttactgatgggctacgcggatgtttatccgggctatgaagtccacggtgatattcccaacaacgggccgggtaaaatgaatgcccagaccctgtgcgaagccaactgcattctggacatggcgctgggttacgattttattagcgacagcctgacgcctggcgaacagcagcacatcagggaaaacttgttgcgctgtgcggccacgtttttgcggcagcatcgcacgccgcagatccataaccatgaagtcaaaatcaatgcggcgctggctgtacttggcttcatcctcgaagatgaggatctactggagtttgccgtttttcagccgtacggcttgcgctggcaactggaaaatggcctgctggcagaggggctatggtttgagggttcgattcactaccactactacgcgctgcagggctttttcgcctttgagaagctggcgcgcggcacccgctggagcctgctggatggcccctggtatcagccgatgctgaaattcccgctgtcgctgctgctgccggatggcacattcccgcggctgaatgactgtcttgccgggcaggaaaagctacagcaccgggatctgtacgagttcgcctggtttatctggcgcgatccgctgtatgccgccgtgctgcaattcaccgaaacggagcctgacgaggatgagacgttattgtggcgccaccatccgctgcctgagtcaccgctaacgccgatcccccagcagtcattttttgcaccgggcgcggggttgaccctgtggcgacgtccgaagcaacagctggcggtgctgattaaacacagtccctggggcggggaacacgaccactacgacagacaaagcctgatgctatggcagcgcgacggctggttgttgccggatcctggcaccaccggctacggggcggaaatgcattatgactattataaaaacagcgccacgcataatacgctgtcagttaaccagagcaatcaaccccctgccatcccgacggtgctgggctggcatatggctgacgacgttttctggctggattgtgagaccgactggggtaaaccgccgcctgcgctcgacagtcatagtcgagtcgaatgggacctggagtcctggcgtgacgtacgctttcgccgccgcctgttgtggcttgaagaggttttgatcgatctctcaacggtggaaaacccgcatcgccagcagctcgactggacgctgcatctggctgccgaggcgctggatcagaacggtacaccgcagcctttttcgctcagcggaccgctgcggcatatgaagaaggcaacgatgacgtcgctgaatggctgtcagccgcgccactttgtgcgggacggcagcactatcgcgctttggctggcgggcgacggcgagctttggcaagggcaggcccctgataacccggcaataaccgaccttagctatctggttatccgcaatcatcttccacaggcgcgttttgtcggtctgtgggatctggccaacggtaacccgcttaccgaagctcatgtggatcccacgccaaagggaacccgagtgaccttctggcgcagtcatcacatgacgcaggtgatgctatatgacgaacccggacgggcccctgatgtgatcctgcagaggaggtaaggtttctcacccgagcaagacgaaacggatttactggtcttcgtcctcatcttcgtcttgatcttcatcctcatcttcaaagcgcgcgacgatctgctcgccggtatgcgttgcgcgcagctcttccgccaccagggcaatcgcctggccgctgcttatcccctgagccattagctcatggatacgttcgaccgctttttgctgttgctcgtggctcagcgaaggtaaacctgcaaacatcttttactcctgctacattgtggggcgtaattatttcacgccgtccccaactacgccagaggggcggcaacgttcaggatcgagaaagatgttgtcccccgcgattattaccctgccctggcgcccggatgcggccgaacactattttgcgccgttaagcgccctgccctgggcgatgctgctgcattccggctttgccgaccatccgcataaccgctttgatattctggtggctgccccgcgcgccacgctgctgacgcgcggtgaacagacgtgggtcgacgacggcgaaaccgttgttgtctcagcggaagatccgctgcagctcctgcagcagcagttggatcgtcagccgttcacgccgcaaccccatgacgatctaccgtttctcggcggcgcgctgggattattcggttacgacctgggccgtcgctttgagcgtctcccttcgcacgcgcaggccgatatcgcgctggcggatatggcggtggggatctatgactgggcgctgatcgtcgaccaccagcgccaacagatatcgctgctcagctatgacgatcctcagcggcgtttccagtggctgctggcgcaatcacgtccggcgatgaaacctttcgccctgacctctgcctggcagtcaaatatgagccgccagcagtacggcgaaaaatttcgccaggtacaggcctatctgcacagcggcgactgctatcaggtcaacctcgcccagcgttttcaggccagctacgtcggtgatgaatggcaggccttccgccagctgaacgccgtcaaccgcgccccctttagcgcctttattcgcctcgatgaaggggcgattttaagcctgtcgccggagcgctttatccagctgcgccagggggagatccagacgcggccgataaaaggcaccctgccgcggctcgattcgccgctggcagatgcgcagcaggctgagaagctggcgaattcgccgaaagatcgcgccgagaatttaatgattgtcgacctgatgcgcaacgacatcggccgcgtcgccgtcccgggcagcgtgcgggtccccgagctgttcgtggtggagccgttcccggcggtccatcatctggtcagcaccatcaccgcccgcctgccaatgacgctgcacgccagcgacctgctgcgcgccgcctttcccggcggctcgatcaccggcgcgccgaaagtgcgggcgatggagattatcgatgaactggagccccagcgacgcaatgcctggtgtgggagcattggctacctgagctattgcggcaatatggataccagcatcaccattcgcaccctgacggcatggcagggacagctgtactgctccgccggcggcggaattgtggcggatagcgaggaagcggcggaatatcaggaaacttttgataaagttaatcgtatcctgcagcaactggagaactagaccatggcggatcgcgcccttaatctggatgattttctgtcccgctttcagcttctgcgcccgcagccttcgcgccatgcgctcaatcagcggcaggcggcggtactggtgccgatcgtgcgccggccgcagcccggcctgctgctgacccagcgttcgccgctgctgcgcaagcacgccggccaggtcgcctttcccggcggcgcagtagataataccgacgcgacgcttatcgccgccgccctgcgcgaagctcaggaagaggtggcgatcccgccggaggcggtcgaggtgatcggcgtcctgccgccggtggacagcgtcaccggctttcaggtgacgccggtggtgggcattattcccccggatctgcactatcacgccagccaggacgaagtctccgcggtatttgaaatgccgctcgccgaagccctgcgccttgggcgctaccatccgctcgatatccaccgccggggcaacgaccaccgcgtctggctctcctggtaccagcattattttgtctggggaatgaccgccgggatcattcgcgagctggcgctgcaaattggcgcacgtccttagctatactgataatgagagggcgctctcattattagtaaaatcgcggttagccattagtttaattcatgtgaatagttgaactgacagggcgcttccctcttacactatgcgcagttattacatcgttaccgcacccgcggtaaccctgtcaggagtattatcgtgattagtctattcgacatgttcaaggtggggattggtccctcatcttcccacactgttggcccgatgaaggccggaaaacagttcgtcgatgacctggtcgaaaaaggattgcttaatgcagtgactcgtgtggcggttgacgtctacggttcactgtcattaaccggcaaaggccaccatacggacatcgccattatcatgggactggcgggcaatcagcccgatacggtcgatattgacgcgatcccggcttttatccgtgacgtcgaagcgcgtggtcgtctgctgctggccaacggccagcatgaggtcgacttcccggcggatgacggcatgcgttttcgcagcgacaacctgccgctgcacgaaaacggcatgaccattcacgcctgggccggcgagaaagagatctactgcaagacctactactcgatcggcggcggctttattgtcgacgaagagcacttcggcaaggaaaacgccaacgaactgcaggtgccctacccatttaaatcggcgcaggaaatgctggcctactgcaaagagactggcctgtcgctctccgggatggtgatgcagaacgagctggctctgcacagcaaaaaagagatcgaggattatttcgccaacgtctggcaaaccatgcgcgcctgtatcgaccgcgggatgaacaccgagggcgtgctgcctggcccgctgcgcgtaccgcgtcgcgcctcggcgctgcgtcgtctgctggtggccagcgataagctctccagcgatccaatgaacgttgttgactgggtcaatatgttcgcgctggcggtcaatgaagagaacgccgccggcggtcgcgtggtaaccgcgccgaccaacggcgcctgcggcatcgttccggcggtactcgcctattacgatcactttatcgagtccgtcagcccggagatctatattcgctactttatggcctgcggggcgatcggcgcgctgtataagatgaatgcgtccatttccggcgcggaagtcggctgtcagggcgaggtgggcgtcgcctgctcgatggcggcggcgggcctggctgaactgctcggcgccagcccggaacaggtttgcgtggcggcggagatcggcatggaacacaacctcggcctgacctgtgatccggtcgccggccaggtgcaggtgccatgcattgaacgtaacgccatcgcctccgtcaaggcgatcaacgccgcgcgaatggcgatgcgccgcaccagcgaaccgcgcgtctcgctcgataaggtgatcgagaccatgtatgaaaccggtaaagacatgaacgccaagtaccgcgaaacctcgcgcggcggcctggcgattaaagttcagtgtgactaaactattcgtgtccctctgcgcctgcaaagcgcgcagggggttaaccctggtgactgaaatctccctgatgcgccttcaacggcgcattttcttttttctatacctggcgatattctgccactacacttgctctataaaataagccacgcttaaccactcgtcctgtcgacagggtgtcgcacatgcagactgcacaaaaagtcattacggcctatcgtcacaaacgcattattgtctgcctgctggtagccctggcgaccctgggcgccacattagccatccgatttatttcgcagcgcagcgtaaatgaagattatattcgcacggccgccagccaacgggtggcggcgctcaatgacatcttgcgcccgctaagcgcgcagcgagccaccctgctccctctggtgggcaaaccctgccctgatatccatctgacgctgcgcaaaatggcggcctcgttgcaaaccattcgttccgtcgccctcgtcacgtcaggtatcgtttactgttccagtatttttggcccgcgacaggcagacttacatcgcctgcagcccgcgcttcctgtgccccgccctctgctgctcttctcgaacgacagctccttgctcaaaggctcgccggtactgatccaatggtatccagccgcggagagcggcctggacggcgtgatgctggtggtgaatattgagctgctgggaaccttaattcttaatgaaaaatcggccctgatcagcgacgtcagcctgcaggttggcgatcgttattttagcagccgccatgggcttctcgaaaaaacgcatgtcccgcagggcacggtgatttatcgccagcgctctacggagtttccgtttactgtcaatattaacggccctggcgcctcggcgattgcgcttgaggagctgcccggcgagctgccgctggcgctgatttttagcctgctaatgaccggcatcgcctggctggccaccgccggcagaatgagtttctcgcgggaaataagccttggcatttcggcccgggagtttgccctctggtgccagccgctgcaggatgcgcgcagcggccgctgctgcggggtggagatcctgctgcgctggaataatccccgccgtgggacgatttcgccggaggtatttatccccatcgccgaaggcaataatctgatcatccctctcacccgctatgtgattgccgaaaccgctcgccgcctggacgcttttcctcgcgaccgccattttcacatcgcgatcaatgtcgccgcgcgccatttcgctaacggactcctgctgcgcgacctgcacaattactggttcagcgtggatccggtgcagcagctggtggtcgagctaaccgaacgcgatgtcctgcaggatggcgaccagcatatggccgaacatctgcactttaaaggcgtacagctggcgatcgatgattttggtaccggcaatacttcgctctcatggctggaaaagctgcgcccggacgtcctgaagatcgaccgctcgttcaccagctcggtcggcatagatagcgtgaacgcgacggtgacagatattattatcgccctcgccaaccgcctgcatattgttaccgttgccgaaggggtggagacgctggagcaggaaaactacctgcgtagccacggcgtcgatgtgctgcaggggttttattatgcgcggccgatgccggtggaggcgttcccggcgtggctggccagcagggaggagagtgagagtgagggtgagggtgagagcgagacgacagaataactcgccggccgcagcggccggcgagcctggcgattactcttcttcgtcgctcggcggacgagtgaccaccgcgcgcaccagatcgacccggtaatcattcgcttccactacggtaaaatgcagcggcggaagcgacacgacgtcgccaatgcgcgggatatgaccattagcggagatcaccagcccggcaacggtggcaatatcctcatcgtcattgatcagtggatccagccccagcgcctgctgcagcgcatgcaggtcggtcgaccccttaataagccagccatcgccatcgatgacaatctctggcgtctcatcagcgtccgggaattcaccggcgatggcttcaaggacgtccagcggcgtgaccagcccctgcaccacgccaaattcattagttacgatgacgaagctgccgcgcgcccgacgcaggaccccgagcagattgatcgggtccagcgtttccggaacgacaattgccggggaggcagaagccagcgccgcgacgttttcccccgactccagggccaccagcatctctttcgcccgcacgataccaatgatttcatccagctctccgcggcagaccgggaagaggctgtgcggcgacgacagcagttgacgacgaatttcatcttcactctgctcagcgtcgacccagctgatttctccgcgcggggtcatgatgctgcgcagggagcgctgggccagggtcagcacgccgttaatcatgtagcgctcttcttccgcaaaggcgccctcaggaacgggcaccgcggctggactgtctgcgtcatggctgacggaggcctgtttgcggccgcccatcaggcgcaggatggcatccgcggtccgagcgcgcagcggcagcgtcgactggtggcgaacaaagttacggcgcgccacctggttaaagaactcgataatgatcgagaaaccgatcgccgcgtacagatacccttttggaatatggaagccaaacccttccgccaccaggctaaggccaatcatcaacaggaagctcagacagagcacgaccaccgtcgggtgctggttgacaaagcgcgtcaacggcttggaggccagcagcatcaagatcatcgcgatcaccaccgccgccatcatcaccggcagatggttaaccatcccgaccgccgtgatcacggcgtccagggagaagacgacatccagcaccactatctgcaatactactacccagaaactggcatagcctttaccgtgaccggcatcgtgctggcggttttccagccgttcatgcagctcggttgtcgccttaaacaacaagaagatcccgccgagcagcatgatgagatcgcgcccggaaaaggagaaatcggcgatggtaatcagtggtttcgtcagcgtcaccatccaggagatgaccgacagcagccccaggcgcatcaccagcgccagtgacaggccgatcagacgcgctttatcgcgctgcttcggcggcagtttgtccgccaggatggcaataaacaccaggttgtcgataccgagcacaatttccagaacgataagcgtcaacaggccggcccagattgagggatccattaacaattccatgtacgactccggtttgcggcaaggtcagtcattgccatgccatgcaggggcgcgacaccaggtgctgaaagaaatgcgggatacgtagaggtggcaatcagatgccagaaagtgaaaagacgtcgatgacggtccatactgcgggctatgccctatactcctgagtaattaaacggaagttaaacatagcaaaatatagatcgaaattggaaataatttacctgaatttgcaataactaaggctattttttgcgctgcaaaattattcgcagacgatacgtgattaacggatcttcatcacattaattattttttcactgtctaaaataattcgcggtagtaactattttctatcttacaccctaactgaatcgattttgtcctcaagagtgattcaggatgtatcaaagcagatgatgcattcacgataataaaggaggtagcaagtgacgattgctattgtaataggcacacatggttgggctgcagaacagctgctgaaaacagcagaaatgctgttgggcgagcaggaaaacgttggctggatcgatttcgttccgggtgaaaatgccgaaacgttgatcgagaaatacaacgcccagttggcaaaactggataccagtaaaggcgtgctgtttctcgtcgatacatggggaggcagccctttcaacgctgcgagccgcattgtcgtcgataaagagcattacgaagttatcgccggcgtcaatatcccgatgctggtggaaaccttcatggcccgcgacgacgatccttcctttgatgaactggtcgccttagcggttgaaaccggcagcgaaggcgtgaaagcgcttaaagccaaaccggtggaaaaagcggcccctgcgcccgcgcctgccgcagcgccaaaagccgccgcaccggccaaacccatgggcccgaacgactacatggtaattggccttgcgcgtatagacgaccgtctgatccatggtcaggtcgccacccgctggaccaaagagaccaacgttacccgcatcatcgttgtcagtgatgaagtggccgcggataccgtgcgtaaaactctgctgacccaggttgcgccgccgggcgtcaccgctcacgtggtggatgtggccaaaatgatccgcgtctacaacaaccccaagtatgccggacagcgcgttatgctgctgtttactaacccgaccgacgttgaacgtatcgtcgagggcggcgtgaaaatcaccagcgtcaacatcggcggtatggcgttccgccagggtaaaacccaggttaacaacgcgatttcagtcgatgccaaagatattgaggcgtttaaaaagctgaacgcccgcggtatcgagctggaggcacgtaaagtgtccaccgacccgaaactgaaaatgatggatctgatcgctaaggttgataaataacccggcggatcgcgccccagttttcactttaagacttaatcaacaggagaagtacaatggagattacccttcttcagattgtgctggtgttcatcgtcgcgtgtattgcgggtatggagtcggtacttgatgaatttcagttccaccgtcctctgatcgcctgtacgctgatcggcgccgttctcggcgatatgaaaaccggtattatcatcggcggtacgctggagatgatagccctgggctggatgaacatcggtgcggcggtagcccctgatgccgcgctggcgtccattatttccaccgtcctggttattgccggccatcagagcatcggcgccggtatcgcgctggctatcccgctggcggcggcaggccaggtgctgaccatcatcgtgcgcaccatcaccgtggccttccagcacgcggcggataaagcggcggagaatggcaacctgaccgccctgtcgtggctgcacgtctcgtccctgttcctgcaggcgatgcgtatcgctatcccggccgttatcgtggcgatttccgtcggcaccagcgaagttcagggcctgctgaatgctatcccggaagtggtcaccagcggtctgaacatcgccggcggtatgatcgtggttgtcggttatgcaatggtcatcaacatgatgcgcgcaggctatctgatgccgttcttctacctcggcttcgtcaccgccgccttcaccaacttcaacctggtggccctgggcgtgattggtgcggtcatggcaatcctctacatccagctgagcccgaaatataaccgcgtcgccggtgcgccggctcaggcggctggtaacaacgatctcgataacgaactggactaacaggtgagcgaaatggttgatatgactaaaaataccaccgagaaaaaactcacacagagtgatattcgtggcgtgttcattcgttctaacctgttccagggttcatggaacttcgaacgtatgcaggcgctggggttctgcttctctatggttccggcgattcgtcgtctgtacccggagaacaacgatgcgcgtaagcaggcaattaagcgtcaccttgagtttttcaacacccacccttacgttgccgctccggtactgggcgtaaccctggcgatggaagagcagcgcgccaatggcgcagagattgacgatggcgctatcaacggcatcaaagtcggtctgatgggaccgctggccggcgttggcgacccgatcttctggggtaccgtgcgtccggtgtttgcagccttaggcgccgggatcgcgatgagcggtagcctgctcggtcctctgctgttctttatcctgttcaacgcggtgcgtctgctgacccgttactacggtgtcgcctatggttatcgcaaaggcgtggatatcgttaaagatatgggcggcggcttcctgcagaaactgactgagggggcgtcaatcctcggcctgtttgtcatgggggcgctggttaacaagtggacgcatgtgaacattccgatggtggtgtcaaaaatcaccggctctgacggacaggttcacgtcaccacggtgcagactatccttgatcagctgatgcctggtctggtgccgctgctgttgaccttcgcctgtatgtggctgctgcgtaagaaagttaacccgctgtggatcatcgttggcttcttcgtcatcggtatcgccggctacgcggtcggcctgctgggtctgtaatttccaggctgtacgccgggggcttgcccccggcttttttttatcaggagaaacgcaaagcaatgaccttcacggacctggtgatcatcctgtttatccttgcgctactggcctacgcgatatatgaccagtttattatgccgaggcgaaacggcccggtactgctggccatccccctgcttcgccgcagtcgcgttgacggcatgatctttgtcggcctcaccgccattctgatctataacaacatcacccagcacggcacggcgatcaccacctggctattatctgtgctggcgctgatggggctctatttattctggatccgtacgccgaaaatcatttttaaaccgcgcggctttttcttcgccaacgtgtggatagaatatcagcggattaaagagatgaatttatccgaggacggtgtgctggtgatgcaattagagcaacggcggctgctgatacgcgtacgaaatatcgacgatctggagaagatatacaaacttctcattacaactcaatgacttaaaaatatagccagcgctatattattcccgttagcagcggagaaatattatagccacggctatatttcccgcctaaccttatcttttttattaactattttttcacttataaatttaaatgaaaatcgttatcatttggttattaaaatagccctcttctgttattgttttatattctaaaaatatgttaaggttgcgcccgtcgttggggagtagccgatttcctgcccgccaggaaatgtacgtgtcaacatactcgttgcaaaacgtggcacgtacgggttgaagagattcaatcaggcgagaccatagatacatcactgctgtacgtattgctcagccattgagcggctccgcgtatgtttactgggggcagcgatgtgtcatatggattatccccggtcaggacacgcacatgaatttatccgctaccattcttctcgctttcggcatgtccatggacgccttcgcagcctccatcggcaaaggcgccaccctgcataaacccaaattttcagaggcagtacgcaccgggctgatttttggcgccattgaaaccctgacaccgctggtcggctgggggcttggcatgctggccagccagtttatcctcgagtggaatcactggattgcctttattttactggtgtttctcggcgggcgaatgatcgtcgaaggttttcgcggcgacagcgacgaggcgtgcgaggcgcctcaccgacatggtttctggcttctggtcaccaccgccttcgccaccagccttgacgcgatggccgtcggcgtcggtctggccttcctgcaggtcagcattgtgaccaccgcgctggcgatcggctgcgccacctttatcatgtcgacgctggggatgatggtcggtcgctttatcggcccgctgcttggcaaacgagccgaaattctcggcggtatcgtgctgattggcatcggcagcgaaatcctctggagccatttcgccggttaagctttacgcttcgcgctgccagcagtggatcataaaatcggtctggcaaccaaaggtcggctgctgacgcagcgcggcgtgcacttcggctttagcccgccatgcgaacggcgtcatctgcagcagggcctgcgcttcacttcccgtcaggatcatcgggtaagccagctgctgctgagcctccaggcggaaccccggcatcgcttccgtcttcagctcatgcaggcgaacttcatcgtaaatcagccctttcagctccagtaggtgacggggacccggcgtggcggtgatcacccaaccaccgggacgcaccacccgcgccagctcttcggcgttgcagggcgcgtaaatgcgcactaccgcgtcgaagctagcgtcggaaaatggcaggcgctggctggaggccacgcaaaaattcacctgcgggtagcgttttgccgccgcgcggatcgccggcttcgacacgtccagcccccagctgcggctggcgatcgcggcaaacgcgtgggtgtaatacccctcgccacagccgatatccagtaaatccgtaggggcgtaatgtcgcagccgctcagcgatagcatcccgtagcggccgataatgtccggcgtcgaggaacgcccgccgggcctgcatcatttcggcgctatcgccgggatcgcgcgaccgcttgaactgcaccggtagcagattgacgtacccctctttcgccagatcgaactggtgccgctgcgggcaggaatagtggttgtcgctacggctgagcggcgcgtgacaaagggggcaactgtatgacatgacggctccggtgttgctgaaagggcgaaagtgtagcgctattcgcccctgcagaccactgttacagcgccggcccctgtgggtggctatcgtgcattacgatcagattctccgccccttgcggcatgccgtccggcatgacgttctccagccgcaggacatcgcccatgatctggctgaagaccggcgcggacacagcgccgccgtaataggaaccattgctcggatcgttcatcaccaccaccagcgcgaactgtggtcgactggcgggcgccacgccggcggtataggccacatacttatcgatatatttgccgtccgggccgattttcttcgccgtgccggtttttaccgccacccggtagtcgcgtaccgccgctttggtaccgcccccgcccgggagcgccacgctctccatcatatgttccacgctatgcacaatactctccggcatcacccgcgtgcccatcaccggcggatcgatgcgggtaatcgacagtggtcgcgcaatgccgaagccgccgatggtggcgtagacgtgggcgagctggagcggggtgaccatcaaaccatagccgaaggcgaaggtggcgcgatccagttgcccccagtagcggcgatgcggcatcagcccggcgctttcgccggtcaaccccagccccgtcggttcgccgaagccgaaagctttataggtatcgatcagatgctgcaccggcatggcgagcgagaggtgggacacgccggtatcgctggatttctgcaggatcccggtcaggctcagctccggataatagcccacatcgcgaatacgatggccatcgaggacgaacggatgggtatccaccacgctgtctggctggacaatcccctgctgcagcgcagtcatgatcaccagcggtttgaccgtcgacccgggctcgaaggtgtcgctgatggcccggttgcgaaaatcatccagcgtcgcgctatcgcgattgttcggattgaagtccggatagctggccatcgccaggatctcgccggtatcaattttgatcaataccgccgccccggactctgctttgttccagcggacggcgttgtcgagggcgtcttccgtcaccgtctgcaggcgttcatcaatactcagctgcagattatgcgccggtaccggcggcacttcggtaatgttctcaatgacattaccatgtttatctttacgcaccagacgtcgcccgggtttaccggtcaactgggcgttaaagcttttctccaccccttcgatgccctgattatcaacattggtaaagcccagcagattggcagccacgtggcccgccgggtagaaccgtcgcgattcatcgcgcaggtagacgcccggcagatgcagtttatcaatccactctgcctgctcgggattgatctgacgcgccagatagagaaagcgagcgtggggatgactctgtacccgctgggccagctctccgaggttgaggtgcagcgcttcggccatcgcctgccagcggggtccatagcccacaccgcccttctccatagtggtctgcgggtcgatccagatagcactgaccggaacgctcaccgccagcggccgtccttcccggtcgctgatcatcccccgctcaaccgctacgggttcttcgcgcagggagcgcatatcttcttgttttaccaggttatcgggggagataatttgtagccagcccacgcggaccagcagcagccccagacaaccgagaatggccacacacagtaacccgaagcgaatcggggtgaaactggcggcggacttcgtttttttctttagcaccatagctccggcattgttttgcaaccaactgatttaacagaaaattagcaaaacagactgctacacaatgctaataaagatgagtatttgcaacaagacgcgacgggagggggaaaaatgacatgctttgcaataaaaatgcaaaagccccgcgcaggcgaggcttttatacaagaagagtggtcttgtatcagatagcagttacgttaactgcagccggacctttctggccgtcctgaatttcgaactcaacgttctggccttcagccagagttttgaagccgttaccctggatagcggagaagtgtacgaacacgtctttgctgccatcagccggagtaatgaaaccaaaacctttagactcgttgaaccacttaacttgacctttaatctttgccatttgcaaaattccttagactgttttcttcgcctgctggcgtttacctagataaaactgacacataactgcatgaggcactaatttaaggttcggcagagaagcggtattcaacgacaacgtgtttactcaggacttctttactgaaaatgccacacataaacagaactgtacctcgtttaacccgaaacgtgttatcacacactacgtaaataatggcaagccatttttaaacgtgtctcgatcgttcgcacaaattataaggtaatcatttgatcgcctgcacatttatgcgtctttgccgcccctggcaaggcgctacagcatcagccaatatcgcccattcgttgcctcattactgcaacttttttaccatagctcaacaacttcgcttcgtccaggtatgtccgtacacgaactgctgtaatgtaagcgtctggtgggcaacggtgaatattgatgcgcataattcgttataactccaggctaaaaatcgctaagccgtgccagtgtagtgataataaaacctgttagtcgtcacgctaaaaatagtgctaattctgcaccttaataatgaaaaaaagatgacagtgtcacgttacccaacaataaacgcggcgagaatgactttatttacagcgtgtaataaagaggatattgcactaagaaaggaataatggaataagaataagatattaccgcccgctatcatgcaggtgcgcatcttatgatgcacacctgtcgggcaccttaacgttcagctaccaggcggataaactcatcctcccctttcgccttgccggcgacggtcggctcagccacatcctctttctctggcgcattagcttcgcacaggcgacgtaacagcgcattctgccgcttttgctgatccagcagcgcttgcagcagctctatctgctcattggcccgcgaactggcgcggttgacgaagaaccataacaacagaccgacaagcagcagcgccacggacacagccagcgatgccagatttaaaatcccaggatttagtaactcactcatttcaccacctcaaagagaaggcgttcattctaccacccgcggcgcagaaggaaatcagtcggcagaaaaatgtcttaccacggaataaatttattaatagtgcaaatgccgctgaaaaactgaacatcctggtcgcacattacgttaagcatctgagtccacagcaacaggcagcctgctatgatgactatcagtaaaacccaccgtaattttttcactccactctccgcatcagtacgcaatgtcgccaggatagcacggccttcttaaaccgcggctaactgtattacgaaaggtaagtttaggaatcatcgacttgtttcaaaacgtgttcgtgtcaaaatcaagccagggatcatacaaataatgaggcatcaatgcgattaatcattcgtactattatcttggtggctatcttatggattggcgtattattgagcggttatggggtgttattccacagtgaggaaaacgtcggcggtctgggtcttaagtgccaatatctcaccgcccgcggagtcagcaccgcactttatgttcattccgacagcggagtgatcggcgtcagcagttgccctctgctgcgtaaaagcacaaccgtggttgataacggctaacatcgaaccggcgatcgcgacgtagcgccgcggtcgccaaccccgttatccgccgcctcagaacggatagtcgttgtatcccatttgttcagaaatcttacgcgccgcctggtggagcatcgccacgtattcatgcaagcgttcttcagagaaacgtagcgttgggaaagagatgctcagcccggcgatgaccacgccgaaacggtcaaacaccggcacgccaatgcagcgcagcccctcttcctgttcctcattatcctcgccatagccctgctcgcgaacgccatccagcacttttagcaactcctcggtgctggtaatggtccgctcggtgctgcgcttatactccacgccgtcgaggatctgctccacttcgctgcgatcgcgccatgccagcagcaccttgccaatcgcggtactgtacagcgggttgcggcggccaatacgcgagtacatccgcaggttatacatcgagtcaattttatggatgtagacgatactgtcttcatccagcgccccaagatggatggtctctttcgtcagccgcgaaagttcgcgcatctgaatatcggcgctgcgcaccaggtcaacgttctgcagcgcgcgcgcgcccagttcgaacagcttgagggtgagagagtatttctcagactctccttcctgtgccacatagcccagtgatttcatggtctgtaaaaagcgataaacggtgcttttcgacatcatgacgcgctgggacagttcggtaatgccaatttcacgctcttcacccagcgcctgtaggatgccgaaaaccttcaataccgaagagacagaatctggctgtttatccaaatctgcacctgccatttatcacctcgtcgtaactgttttataaaaattagaaccggtttttattataaattcgccgcctctgagccgcaatcattcttctgccacttcgttacaaatctgcgacatactgcgaattaatcaatgctaaactcatcattcaaaaaaccgtttcatttaagactcatattcaccatggataaaaattcttctgatggcgtgccgttgccgcaacgctatggcgccattctgaccatcgtgcttgggctgaccatggccgtgctcgacggggctatcgccaacgtcgcgctgccgactatcgccagcgatctcaacgcctcaccggcggcttcaatctggatcgttaacgcctaccaaatcgccattgtcatcgccctgctgccgctctccttcctcggcgacatggtcggctatcggcgtatctataagataggcctggtggtgtttatctttacctcgctggcctgcgcgctgtcgcgtagcctcgaaatgctaaccttcgctcgcgtcgcgcagggattgggcggcgccgcgctgatgagcgtcaacaccgcgctgatccgtctgatttatccgcagcgctttcttggtcgcggcatgggcattaactcctttgtcgttgccgtctcttcggcggcaggcccgactatcgccgcagcgatcctctccctcgcctcatggcaatggctgtttttaattaacgtgcctctcggcatcgtcgcctttgttctggccatgcgctttctgccgcccaacagcgcgcgcagcaaaatcatccgcttcgatctgccgagcgccattatgaacgcccttaccttcgggctgctgatcaccgccctgagcggtttcgcccaggggcagtccactcagctggtgctggcggaggtcgccgctatgctggtggtggggttcttcttcgttcgccgccagctcacgatgcccgtccccctgctaccggtcgacctgctgcgtatcccactcttctctctctctatctgcacttccatctgctccttctgcgcgcagatgctggcgatggtctccctgcccttttttctgcagtcgatgatggggcgcagcgaagtggagacgggtctgctgctaacgccgtggccgttagcgaccatggtgatggcgccgctggccggctatttgatcgagaaatgtcatgccgggctgctgggggctatcggcctgctgattatggcctgcggcctgttcggcctggcgctgctgccctcgtcgccctccgatctggatatcatctggcgcatggcgctgtgcggcgccggcttcgggctgtttcagtcgccgaacaaccataccatcgtcgcctcggctccgagccatcgtagcggcggcgccagcggcatgctgggcaccgctcgcctgctcggacagagcaccggcgcggcgctggtggcgctgctattcaatttgctcggtaacaacggcacccacaccgccctgctgctggccggcaccctggctatcgtcgccgcgctaattagcggtctgcgggtcactcagccgcgcgcagcctgacggacggtaaaaaaaatccgcagcttgcgggctgcggattttcgttttcagcgtcagaagatagattatttcagatattcaccgctacgcagggcttcaatacgcttatccagcggcgggtgagtcataaacagttcgctcatggatttcgctttaccgttaatgcagaacgccatcatgctgctggcttcctgcggctcatagctggttttcagacgctgcagggctgcaatcatcttctcgcggcctaccagacgcgccgagccggcgtcagcatggaactcacggtaacgcgagaaccacatggtgattatgctggccagaataccgaacaccagctcaagcaccgtagcgaccgcgaagtagatcagcgggttgccattgctgctctccccttcatcttcccggttgccgccgaggaaaccggccgcaatctgcgcgataacgcgggagataaagataacgaaggtgttcaccaccccctggatcagggtcatggtaaccatatcgccattggcgatgtggctgatttcatgggcaatgaccgcttccgcttcatcacggctcatgttttgcaacagcccggtgctgacggcgaccagcgaggcgtcacgacgcgcgccggtggcgaaggcgttaatgtcaggcgcgtgatagatagctacctgcggcatggcaatacctacctgctgcgcctgctgcgcaacggtattcatcagccagcgttccgtttcgttgcgcggctgctcgatcacttccccacccactgacttcagcgccatccacttcgacatcatcagcgaaacgatagaaccaccgaagccgaacagcagggccataatcagaagaccggtcatgctgctggattggatccccgtgaggcttaacaccagcccgaacacgaccatcactgccaggttcgtcagcaggaaaagcgcgattcgcatcataattttctttttacctcaatttaacaaaacgcactatgcgattacccacatcgtatgggtcaggctgcaattttcaaccatcagcccccgctaagtcacgataaaaacacaactttacattttgtagcatcttgctgacagcggcagcgcaggttgacattttgttagatgagctgaatggcgatgacaacgcgcacaaaaaaaacgggcacctctcagggtgcccgttagcaacttatttgctagccggcggttccaccgccgggcgcgctttttccagatgcgccaggtctaccgcgatatggaccgtttcatcaagatacggatccggctcctggtaatccttcggcagatcgtccagttttttcagcggcggcttgccttcgcgtttcaggcgatcgttaatccgcgccagacgaatcgcatcatcttcttcgttctctttctcacgctgggcgtagttcagagagacgatgttacgtttgtccttcatcgcgttataacgggcaatatccttcatgatgtactggaattcaggatcctgcgcaatacgctcgtcgtggcgcttgagcagctccggtccaaacggggtcagatccccggacttcacataggtggccgcgttgatgctatcccacggcagcgcgttgtcttcatactgctcgccggtttcgcgatcttcattgccggttggcatcatgatatccggcgtcacgcctttgcgctgcgtactgccgccgttaatacgatagaacttctggatggtgtactggacggaacccaacgccggccactccggacgcagcatttgatcgtaaatacgattcaacgagcgatactgctgtaccgtccctttaccgaaggtcggttcgccaacgatcagcgcgcggccatagtcctgcatcgctgcggcgaagatctcagacgccgaggcgctaaagcggtcaaccagcaccaccagcggccctttgtaataaaccacgccatcgttgtcgctgtcttcgcgcactttgccattattatcccgcacctgcaccaccggaccggacggaataaacagacccgagagcgataccgcctctgtcagcgctccgccgccgttgctgcgcaggtcaatgatgatgctgctgacgttctgtttttccagcttctgcagctgcactttcacgtcatcggtcaggccaacgtaaaagcctggaatatccagcacgccgactttttctttcccgacggttttcaccgacatcttcaccgcacggtcttccagacgaatgcgctcgcgggtcagcgttacaatacgcgtcttggctcctttaccggccggcaggatttcaagacgaaccttgctgcccttcggccctttaatcagagccacgacgtcatccagacgccagccgatgacatcaaccatcgacttcccggtctggccaacgccaacgatgcgatcgccgacgctgatcgctttgcttttcgcggctggaccgcccgccaccagcgaattaatgacggtatagtcatcatccatctgcagcacggcgccgatcccctcgagtgagaggctcatttcggtgttgaactgctcggtattacgcggcgacagataatttgtgtgcggatcgatttcgcgagcgaaggcggtcatcgccagcgagaagacatcttcgctgttggtttgcgccaggcgacggatagcaaacttatagcgacgggttaaggtgtcgcggatctctttatcgtctttacccgccagcttcaggcttaactggtcaaacttaaccttagcgtcccacagcttgttcagctcggcctcgtcttttggccacggcgctttggagcggtcaaggttgaaattatcattgccggtaaagtccatcggacgttcaagcaccttcagcgcatactgatagcgctcgaagcggcgctgctgccccaggttgtagaggtcgtaaaagacgtccagtttcccgctgcgcagctcatcgccaatttggtcttttttagccgcaaacttcgccacatcgctggccagcagcacattgtggctgtagtccagcaggttcaggtaacggtcaaaaatctttgccgagaaggcgttgtcgagatcaaactgacggtaatgagagcgggtaaagcgcgacgtcacgcgctcgcttaccgtcgcgtgctgcggctcttctttcagcacggggatttgatctgcgcgggttatgtcatcaacagcgaatgcatggcctgctattgccagcaggcccgcaagcgcggtgattttaaaaaatgtgttcatgcctggcccggcctccgtttcagaacaccaggtgttctgcgcgtacaatcattgacataccagaagtcagctgtacacgaacgccatctttggtgatttccagaacggtggcgtccatggcgttattgcctgcttttaccttcagcgcctggccgacggtcagaacggaaacatccgataccggagtaagacgctcttcacgcggggctttggccgcaacaggacgcggtttacgctgttcagcgccttctttacgacgcggctgctgaggacgcggtttacgctcgcggcgaacgccttcatcctgctggcctgcggccgcagcggcttcgcgttttttcgcctgctgggctgcgcgctgcgcctgaacgcgagctttcgcttcttccagctgctgacgcgcatgggcaatgtgctgctcttccagttcgccgcacggattgccatccaggtcaacgcgaatagcgccggcttttacgccgtacagataacgccagctggacgtgtagagacgtaatgcagcgcgaagctgggtcttgctgagattcatctcaccacccactcgctcaacgagatcctgaaaaattccgattttcagggggcgcgcttcaccttcagcgctaaagcactgcgggaaacgttcggccagaaaggcgataacttctttactgctattcaacttaggttgattttccatgaaatttcctgattacaacggacgtagccaacaagccgcaggcatgaacaggcgacattataatgacgtcctcgctaaatgctacgttatccgttgattatcccacgacacgggtaaagattttttgataatccgtggccgcaatgagtttttccagatgctcgaccagcgtgcgcaacccctgctcatcttcagcggtgaagcgcccgtaagccggactatcgatatccagcacgccgataatctggccattcacgcgcagagggaagacaatttccgaattactggcggcatcgcaggcaatgtggccgtcaaaggcgtggacgtcctcgacgcgctggacctgagcctgcgccaccgccgcgccgcatacgcctcgcccgaccgggatccgcacgcaggccagtttgccctggaacggtcccaacaccagggtatcgccttccagaaggtagaaaccggcccagttgacctcgctcagccgctcgaacagcagcgcgctggtattggcgatcatcgccagaaaactggtttcacctgccattaatgcctggaaatcgcggttcagatccgcgtaaaattctgttttgctcattatatcttcactttgttgtcttactgcctgatacgtacagcctactaaaataagcattaaatgcgcttgggctcaagatgaattcattcataggttaagatagtgagatacattcattcctgtacgtaataaatgccgataaaaacacccaccctcaaacctgcgaaaaagatggtcgtgcataccgtcagcacgccgcttccctatgcgcattatcagcgctgtacgcagtgtgacatgctcttccgcttaccggtgctcaaacgcaaccaaagcgcctggtgtccgcgctgtaacgcgaaggtgcgcgatggtcgcgactggtcgctgacccgcctgggcagcatggccctcgcgatgctattgctcatgcctttcgcctggtctgaacctctgctgcgcctgcatctgttgggcgtacgcatcgacgccaacgtcctgcaggggatctggcagatgaccgcgcagggcgatccgattaccgccgccatggtactgttttgcgcggtggtcgccccggtgctgctggtggtctccatcagctatctctggctgggcaatgtgctggggatgaacctgcggccggtgctgctgatgctcggcaagcttaaagagtgggtgatgctggatatctatctggtgggcatcggcgtcgcctccatcaaggtgcaggattacgccttcctgcagccgggcatcggtctggtggcgtttatctccctgacgttgttgagcatcctgacgcttattcatatgaacgtcgaagagctatgggagcgtttctatcccgagcgtccggcgacccgcgccgataataatctgcaggtgtgcaccggctgccattacaccggctatcgcgacgcgcgcggccgctgccgacgctgccacacgccgctgcatcatcgccgaccgcagagcctgcagcgcagctgggcggcgctgattgcctcgctggttttcctctttccggccaacctgttgccaatctccattatctacgtcaacggcgcgcgccaggacgacacgatcctctcggggatcatctccctggccagcagcaatatcgccattgccggggtcgtgtttatcgccagtattttggtgccattcaccaaagttatagtgttatttaccctgctgctcagcatacaattcaagtgcgagcagggattgcgcacccgcatcctgctgctgcggctaatcacctggattggccgttggtcgatgctggatctgtttgttatctcactcaccatgtcgctaataaatcgcgatcagctcctcgccttcaccatggggccggctgcggtttactttggcggcgcggtaattttaactattcttgcagttgaatggctggacagccgcttactttgggacgcacatgagtcaggaaacgcccgcttcgcagactgaagccagaataaaaaccaaacgccgtatttcgccattctggctgctgccggtcatcgcgttgctgattgccgcctggctaatctggaccagctttgacgatcgcggatcgacgattacgattgatttccagtccgcgaacggcatcgtgccgggacggacgccgatccgctatcagggggttgaagtcggcaccgtccaggatattagcctcagtaaagatctgagtaagattgaggtttcggccagcatcaaacgcgatatgaaagatgcgctgcgcaaagagacccagttctggctggtcacgccgaaagcctctctggccggcgtatcgggcctcgatgcgctggtgggcgggaactacatcggcatgatgccgggcaagggtgaacccgaagatcactttgtcgccctcgacacccaacctaaataccgcatcaacaacggcgagctaatgatccacctgcaggcgccggatcttggctctctgaacagcggctcgctggtctacttccgaaaaatcccggtcgggcgagtgtatgattattccctgaatgccaataatcagggggtgaccatcgatgtgctaatcgagcgccggtttaccaatctggtgaaaaaaggcagccgcttctggaacgtctcaggcgtcaaggccgacgtcggcctgagcggggccaaagtgcaactggagaacctgtccgcgctggtgaacggcgccatcgcctttgactcccccgccgattcgcatgtcgcctcgcaaaacgatgaatatcacctgtatgaagatctggcgcatagccagcgcggcgtggtagtgaccctcgatctgcctgatggcgacggactgaaagcgggctcgacgccgctcatgtatcaggggctggaggtgggccagttaagcaaactgaatctaaaccccggcggcaaagttactggcgagatgaccgtcgacccgagcgtggtgacgctgctgcgggagaaaacgctgattcagatgaagaagccgaagctctccctcgataaccccagcattagcaccctgctcaccggcaatacctttgagctggtgcccggcgaaggcgagccacgcaatcacttctcggtaatgccggcggataaagcgctgctggatgagcccaacgtcgccaccgttaccctctcggcgccggagagctacggcatcgacggcggtcagccgctggtgctgcacggagtaaaagtcggccaggtgctggagcgtaaactgacggccaaaggggtaacctttcaggttgccattgaccctgaataccgcgatctaattcacggcgacagcaaatttgtggttaacagtcgtctggacgtcaaagtggggctcgacggcgtgcaggtgctgggcgccagcgccagcgaatgggtgaacggcgggatcagggtgatccccggcgaaaaaggcaaaatgcaaagcagctatccgctgtacgctaaccttgaaaaggcgcaggaaaatagcctgagcgaagtgccgaccactaccctgagcctgtctgctgagacgctgcctgacgttcaggccggctcggtggtgctgtatcgtaaattcgccgtcggcgagatcatcgccgtcaaaccgcgcaaggatgcattcgatatcgatctgcatatcaagccggagtaccgctacctgctgaccaacaacagcgtcttctgggcggaaggcggtgcgaaggtcaagcttgacggtaacggactcaccgtgcaggcctcgccgctggcgcgcgcgatcaaaggggcgatcagtttcgataacctcaatggcagcagcgccggagcacggctgaataacaaacgtatcctttatgcatctgaaacggcggcgcgcgccgtgggcggccaaatcaccctgcacgcgtacgacgccgggaagatggcggccgggatgccgattcgttatctcggcatcgacatcggtcaaatccagtcgctggagctaatcaccgccaaaaacgaagtgcaggcgaaagcggtgctctatccggaatacgtcggcaccttcgctcgcgccgggacccgcttctcggtgatcactccgcaaatctccgccgcgggcgtggaacatctcgacaccctgttccaggcctacatcaacgttgagcccggccgcggcccggcacgacgcgattttgagatccaggatacgacgatcagcgattcgcgttatatcgacggcctgaacatcgtggtggaagcgccggaggcggggtcgcttggcatcggtacgccggtcctgttccgcggactggaagtcgggacggttaccggactgtcgctggggtcgatgtctgaccgggtgatggttaagctgcgcatcagtaagcgctaccagtacctggtacgtaataactcggtgttctggctggcctcgggttacagcctcgacttcggcctgattggcggggtggtgaaaaccggtaccttcaatcagtttatccgcggcgggatcgcctttgccacgccgccgggcacgccgctggcgccgaaggcccaggatggcaagcacttcctgctgcaggagagcgagccgaaagagtggcgggagtggggcaccgctctgccgcagtaatgcccccttctcccgccccgggcaacgcctggcgcggggagagggtaaaccgcacgccccggtgtcacgcgccggggcgtttgtgctaaactgcgcaccctttttttctgtggtgcgctgcccgtggctgaaaatactgtctatttccctgaagcgtttctcgctcaaatgcgcgcggcgatgccagcgcatctctctttcgacgactttatcgccgcctgtcagcgcccgctacgccgcagtattcgcgtcaatacgctgaagattggcgtcgatgatttcctctctctggttgccccctacggctggcaactcgcgccggtgccttggtgcgcagaaggattctggatcgagcgagaggatgacgacgcgctgccgctgggcagtaccgccgaacatctcagcgggctgttctatattcaggaagccagttcgatgctgccggtcgccgccctgttcgccgataaccggcagcccgaacgggtgatggacgttgccgccgctccgggatcgaaaaccacccaaattgcagcccgaatgggcaacgcgggcggcattctcgccaatgaattctccgccagccgggtgaaggtgctgcatgccaacatcagccgctgcggcatcagcaacgtcgctctgacccacttcgacggccgggtttttggcgcggccttgcccgaaaccttcgatgccatcctgcttgacgccccctgctccggcgaaggggttgtacgtaaagacgccgacgcgctgaaaaactggtcgccggagagcaacctcgacatcgccgccactcagcgcgagcttatcgacagcgccttccatgctctgcgccctggcgggacgctggtgtattccacctgcaccctgaatcgtgaagaaaatcaatcggtcattgagtggctgctgtcccgctatccgcaggcggttgagatcctgccgctgggagagttgtttcccggcgcagccgacgccttaaccgcggaaggttttctgcacgtttttccgcaaatttacgattgcgaaggcttctttgtcgcgaggttgcgcaaaactgcggcgatcgatccgctcccggcgccaggctataaggtcggtaaattcccgtttacgccgctgaaggaccgggaggccgccgcggtaactgccgccgccagggctgttggcctggagtgggacgcaggccatacgctgtggcagcgggataaagagctgtggctgtttccgctggctttggagcccctgttcggcaaggtgcgcttttctcgcatcggcgtgcgcctggcggagctgcacaataaggggtaccgctggcagcatgaggcggttatcgcctttgccgcgccgcagcgcgccttcgagctgtcgcaggaggaagcggaggaatggtatcgcgggcgcgacgtctatccgcaaaccgcgcctgggcaggatgaaaccattgtgaccttccagggcgtcccgctgggcctggcgaagcgcgtcggctcccgactgaagaacagctatccgcgcgaactggtgcgcgatggaaaactttttgccggcaaggtgtgaggccgcgcaaaaaatgcgcactttttgactggcgcttttcgccccattgactacgctgaaaaataacggccataactggtcgtaccacaactcagctgaaaaatggggtgaagcgatgagtaaaaccaatgtccgcatcggcgcgttcgaaatagacgatgccgaactgcacggtgagcatcagggtgagcgaacgttaagcataccctgcaaatccgatccagacttatgtatgcagcttgacgcctgggatgccgacaccagcgtgcccgcgattctcaatggcgaacattccgttctctaccgtaaacattacgaccgccagtccgatgcctgggtcatgcgccttgcctgacaccaatgaacccgtcgcctgagacgggttatttatttccccgtcccgccgtcatcccctacactaaatagtatgtgaacccgagcatgaggccaggatgtttgccttagtgttgtttatttgctatctggatggcggctgcgaggacattgtggtagacgtctaccgcgaggaaacgcagtgcttagtggcgatggaggatcagcggatccgccacggtggctgctacccgatagaagattttattgatggcttctggcaacccgccagcgaatacagcgacttttagcctgccgactgcagcgccaccagcgtcagcgccccaccaaacacagcgcccgtatcaatatagtgttgattatcgtggtcataacgcgcctgaagcggcgtatggccaaaccagaaatggtctgcgccggcaatagcgccatggcgccccgccaggtgttcactcagacgatagcggctccatagtacccgttggggatccaccggctgctgccagcgatagaccggcgccgggtaatcggcgtgggcgatcacatgccgcgctttcccgcattccacttcaataatcaacggtagccgccgacagtgcgccagcagccgatcgacgtcggcccgctgccgcgcatcacccttgacgtaccagtcgccaccgttcatctgccagagccgcatatctccgctctccagcgcctccagcgccatctgctcatgattcccccgaacggccctgaaccagcgacagcgcaacaggccaagacaatcggcgctctgcggcccgcgatcgatcagatcgcccaccgagatcagcagatcggcccagggatcaaaacgcaactgacgcaggcgattcatcagcagcgcaaagcagccatgcagatcgcccatcagccagatattacgccagtcgctgccgttaatacgttgatacatataattacctctcagcggtaattataggtaattccagcaaaggtccacggaatttaatttacacctcaatcaattttaaacagacggcaaatatagtccgccagaggattaagcttgtcagtggctcgctttaaaatagggggaaatcacaacgaggtgtttatcgtgacagacaatagcctgcattcatccggcgtgctagcgccgcgctcgcatcttattgccgatctggtgatgggcagattgacacctgcccccatctggcggcaaaaaaattaccgctttaagtttttgctgcgcacggccttattttataacgccaccagagcgatgctggaagcgctcagcgctcgggatgattttaatcagctgctggccgcacaggctacgctgccgggcaaagtacaccgtcaatatctgacccgcgatctcaacgcctggcagcgggcggtggcggtaatcaaccattatcgctatatcgacaccctacgcggatcgcggctggcgcacgctatgaccgcggtgtctgaggtcccgctgctgacgttaaacggaaaagaggaccgccggtttactctttatgcctcctcggcaggcaaagccgaacgtgagggtgaaaccactctgtggctgcgcgacagcgaccacaccctgctggccagcgccaccttcagcgtaacccgtgatcacgatgcctggcagctggttatcggcggtctgcaggggccacgacgtcacgtttctcatgaggtgattaagcaggcgactcgcgcctgctacggcctgtttccgaagcgcctgctgctggagtttatctggcagctggccgctcgcagccaaatcgcggctatttacggcgtcagcgataacggtcacgtgttccgcgccctgcgctatcgcctgagcaaaggccgccatttccacgccagctacgacgagttctggcagtctatcgacggccagccggaaagcccatggcgctggcggctaccgctatgtctggaaagaaaatcgctggagagtatcgccagtaaaaaacgggctgaatatcggcggcgattccagctgctggatcagctgacggagcaggtggcaatattgacgcagcggcatgccggtgactaaattgcactgtcggtgaagccgaattacaacatggcgtttgcttattatgtcaatatttcgctactatcagggtccccgaaggccaccggatagtcgcttgcataatgagtaaaaccgaaatttttctgctgattattctggcggtcattctgctcgggagcatatggtttattttcagcgatgaaatttggctattgctctgctatctggaaagccagatataccctacattcagcgttccgcaataatattttccgcccgcaaaagtgctcgtgcttattatttatgccacctcgtcagccggcgaggtgtaatcgcatgaattgccaaatcgtttagattttgcttattttatttatcatacaaatatgtatactagcaggcttccgatgttggcccgccagttaacctgcacgccgggcctgtttaggtgcaggttttttcttttctccgccctcgtttacggttccaccgttgccacctccccttccacaggatgcgatttatgtgtaaatgaattgtgtatgctaaaaacggtgtgctataacgggacatccagaggccagcgggtgtttgactgacaggatgtcgctggctcttgggaaagaagacagataaagataaaaagagaccgaatacgattcctgtattcggtccagggaaatggctcttgggagagagccgtgcgctaaaagttggcattaatgcaggctaagccgccttgcactataagaatagtttaacgcgtcagcttttccagtccgcggccaaagtggctgcataattcctggaaagggggcctctgccagcgaaaaaaccgccactgccgttgtccggcaagggcggtttttttgatgttattacagcaggatagcgagaaagtttagcagagcttctgcgctcgctcgataaagggcgcgaggctcattttttgtcccggatgctgcggatcgtcgatctggatcactgagatcggctgcgcggtggttttgccggctttgacctgctgctcagccacctcattgagcggatactggaccagcgtgctcgggttgatggcgtaaagcgcgttacccggtcgacaggtcaacatgacctcttcccggttgaacgcccagctctccttccccacctcaaaacggctcacggtgataatttgtggcgctgccagagcagccccggagcttgccagtaacaacatggtcagaacaatttttttcatgattttgccagttaattcaataaggttcccaggtggcaaacagactgacggccagcagcgccagcgcgccgagccctatttcagcctgcgtggttcgcaggatcaggctttccgcccgcgaaccgcttgccgacatgcgcggtaccagaacatacctgttcactaacgcaattaccaccatcccggcgaccagcgcacatttgatcaacaacatgcgtccccacggcgatgcgccaatcaatcctccctggatcaacagcgcattgagcgctccgctggcaatcgtgccggcgacggccagatgcccgtaacgtgaaaagcgcgccatggtatagaccgcggccggccgccagcgcccctgcgccaggcgcaggcaatagataaagggcaacagaccgccaaaccagctggcgacgcagaagagatgcacagcgtggtttgtccgctgcagcacgccggtgagaccatcgtgcatagcggcgtgccctaccccggcggaaagcagcagctgtgccgccagcagggccaccagctggcgggcgccgtgacggggacggatccacactaccgcaagcgcgatccacgccagtaggatctgccagatccacactccaccaaagcgggtcccggccaccgcctgccagacggcgggtcgccagacatccgtccagccctcgcccatcattcctccctgcaggagatacagcgccagcgtagagatcgcgccgatcagcagcagcgggcgcagtagtggataaaagcgcagcatcagcacgcgtctcagcggtaccggcgcccaccaggcgccatatagcacgcagccaaaagccagcatcagggagataaagtgcccaaagcgcagggtaatatagagcccggtcagcatcgcttacttcacgctaaaggtatattgccctttggttttatgaccatccaccgagaccacatgccatgccacggtgtactctcccggcggcaaggcttccgccaaaggtaacgtgacctcggccggattatcggcgctgcgggtcagttttccggtagccaccgcatgctgctgcggaccggtgacggtcacgccgctgaatgcgggttcaataccttcggaaaaactgagcgtcaacgtctgtggggaagctgaaagctgcgccccggcggtcgggatctgctgctgcaggtgagcgtgggcgaaggcgcccgccgcggttaacatcccggcaagcgcaacggagagacgcaacgcgcgtccagcaagaagtcgcatattcgtcattcccttttgttatgtctgtagcacagagaataaccctgtataatgccagagtcgagccaggcatctggccctgaccggatttataagcagagtggagtggatgatggaaagaaatctggccaaaatttcgcaagatgagatggataaagtcaatgtcgatctcgccgccgccggcgttgcttttaaggaacggtacaatatgccggtggtcgctgatttagtcgagcgtgaacagcctgcacatctgcgcgactggttccatgaacgactgatcgcccatcggctggcctccgtctccctttcgcgactaccgtgggagccgaaacagaaataatgcgcgctcgcctcctccccgtcggttggcaagcccggccaattccattacgcttattgttttgctctggagcgagccatgctgcgcgtcattgataccgaaacctgcggcctgcaggggggcatcgttgaaatcgcctcggtcgatatagtcgacgggcaaattaccaatcccatgagccatctggtgcgtcccgatcggcccatcagcccgcaggcgatggctatccaccggatcacggaagagatggtcgccgataagccgtggattgaggagattattccgcactatcatggcagcccgtggtacgtcgcgcataacgccagcttcgatcgccgggtgttgccggagatgcacggcgagtggatctgtacgatgaagctggcccgacgcctgtggccgggaatcaaatacagcaatatggggttatataagtcacgtaagctgaacgtgactacgccgccgggactgcatcaccaccgggcgctgtatgactgctatatcaccgccgcgctgctgctggatatcatcaatgtttccggctggacccctgacgaaatggccgatatcaccggtcggccggcgctgctgactacttttaccttcggcaaataccggggtaaggccgtcgccgagattgctgaaaacgatccaggctatctgcgctggttattcaacaatctcgaccgcatgagccccgaactgcgcctgacgctcaggcattacctcggggaatagcccctacactgccgcttttcccggcagtgtcccctgcgccagggcgatgaaaaaggcgtactccagcgccaccccttcatagcttttaaagcgcccggattttccgccgtgtccggaatccatatcggtgcagagcagcagcaggttatcgtcggttttcagttcccgcagtttcgccacccatttagccggctcccagtattgcacctgggaatcatgcagaccggtagtcaccagcatgtggggatacgcctgcgccctcacgccgtcatagggactgtagcttttcatataatgataataggtttcatcctgcggatttccccactcttcaaattcaccggtggtcagcggaatagtttcatccagcatggtggtcaccacatcgacgaacggcacctgggctatcacgccatggaacagctctggccgttcattcacggccacgcccatcagcattccgccggcgctgccccccatgccgtagcagagccgcggatcgccgtacccctgggcaagcagcgcgtcacagacgtccagatagtcgttgaaggtatttttcttacacaggaatttaccgtcttcataccattgctgacccagctcgccgccgccgcggacgtgggcgatggcgtagacaaagccgcggttgagcaggctcagccggctggcgctgaaatcggcatcgatactctcgccatatgagccatagccatagaccagcagcgggttgctccctttgcgaaaatgttcgcgatggtagaccagagagaccgggacttcgacgccatcgcgggcggtcacccacaggtgttcgctctggtagcagctcgtatccagcccctttacctcctgctgtttgatcactcttcgttcgccggtatccatatccagttcaaacagcgtatccggcgtagtcatggaggaatagccgtagcgcagtcgcgacgtttcgggctccggattataggcaagccaggtgacataggccggatcgtcaaaagcgatccccaccacctcccgggtcttgcggttaatttgccgcagactggtcaggccacgctgacgctcttccacaaccagccagtcggtaaacagggtaaatccttcgagcatcacgtcgtgacgcggcgggatcagcgtggtccactgttcttcatcacgtagcacggtacggtagaggccgaaattcttcccctcccggttggaacgaagatagaaagcgtgctgatagtgatcaagactgtattcatgatctttacgccgtggcagaaagcagaccggctcggcgtctggcagttcggcgttgagcagcagcacttcgctggtggtggcgctggagagataaattaccacgaactgctgggaggtggttttatgcacgctgacgtagaaggtctcatctttttcctcgtagaccagcgcgtcgctctgcgccggtgtcccgacggtgtggcgccagacctgataagggagcagcgtggtgggatgtttacgcacataccaaacaaagcgtgaatcgttgctccaggcaaagccggaggtgacattttcgaggatttccgggtaccactcgccgttgctgaggtcgcaaaagcgcaggccgtactggcggcgggaaaggtaatcttccgccaccgccattagctggttgttgggcgcaatgcccagtccgcccagggtgtagaactcgctcttcgccgcccgctggttggcatcgagcaggatctcccactcatcccactcttctttcagcaccgactgccgctggtagatagcgtattcgcagcccggctcatacacctgacggtagcgaaagccgtttttactgtagggggcagagacttcccgctgcggaatgcggtcgataatctccttcagcagacgctcctgcaggctgagctgcgaatccatcacttgcttgccgtaagcgttctccgcgtgcagatactccagcacgtcaggtcgcgcgcgctcatcgtcgcgcagccagtaataattatcgatgcgtgtatcgccatgcaaggtcatggcgtgagggatccgtttagctttaggtggcatgttattcttctgctgctttatcgtgacacaagagcattcaggccgcagggtggcgcctgaatgatgacgtgtctataagggtggcaaaagacgcgagcgatgcaagcgaaacgtgatgatttagacgcttagcgcttgtttttgtgactggatatcctgttctatatcggcccggacatctttcggcagcgccagggcgtctcccagcgcattaaggtagctacgctccataaaatggtcgatatcaatcaccgcgcagctgacgtagtagatctccagcgcctcctgcgggtcgatgatgccctcggcgagacgctgcggatccagcggctgggctagcgcctggtcaattagcacccgggcctgaacgtcaatattggccgcccgcagctgagtttcaatattcgcccgctcgtggtcatcaatatgaccgtcgcttttcgcggcaaataccagggccgtgatcagccgcacgctacgcggatcgacctccgccgctgccgtctcaggcgcctgggcggatgtattctgcgcgcgcattttctgctgatacttgttccataacaccgtgcccgccaccgccccgccgcctgccagcagcgcgctagtgccatatttcgccaataatttgcgtgacgatttgctggccaccagcaatccggccagcccaccgatggcgccgggcagcaggccgctcccttttgacgactcgccggacggtgacgcaccctgctgcccgagcagcgactgcagttgatgtagccagttagccatggttttcctctcaggtgacaaacactgttatcagcctaaacgacgcgatgtcaggaaatgttagatatggctaaagatgcgcaaaggtacgtgcgacggcagcatcggggccgaccgaccagtgactgaccgccagcgttcaggctgccttggctttgcgcgctttggccgccggcacggcgtcatcacccgccggagaagtctcggcggtagccgacggcgcggaggcgtcctgtgcgggcgtctcttgctccggcagtcggccaactcgcaggatatgctgcagcgcttctttacgctccgccagccacatcgccatggtatcgcgctggacgtcatccatctccagcggcgatgtcaccagccagtcattcagcacctctgccagatcgagcattttgtcgtaagcgtcggcctcttttttgctggcaaaagacattttttcctcaccttcgcggatcaccacatatttaatttcaaccgccatactgcagcctctcaacactgtatttttatacagtatagcaaatttccctcccggactcaactcacgcgcgttacgcgcgtaaagacatacgcaaacgttttcgtttataatcgctgccatctttttttactgcggatgagagttatgactgtattaggcaccgcgctgcgcccggcagccaccaaagttatgctgttaggttccggcgagttgggtaaagaagtcgctattgaatgtcagcgtctgggcattgaaaccatcgccgtagaccgctaccccgatgccccggcgatgcaggtcgcccaccgcgcccatgtcatcaatatgctgcatggcgagagcctgcgcgccctgattgaacaggaaaaacctgattatatcgtgccggagatcgaagctatcgctaccgacaccctggtcgaactggaacaggccgggcagaaagtggtccccacggcgcgggcggcaaagctcaccatgaaccgcgaaggcattcgccgcctggcggcggaagagctgcagcttcccacctcccgctatcgttttgccgacagcgaagaaggcttccgcgcggcggttaccgagatcgatttgccatgcatcgttaaaccggtgatgagctcctccggcaaaggccagagctttatccgctcggctgaccagctcagcgaagcctggcgctatgcgcagcagggcggccgcgctggcgccggacgggtgatcgtcgagggggtggtgaacttcgatttcgaaatcaccctgctcaccgtcagcgccgtcgacggcgtgcatttctgcgctccggttggccatcgccaggaagacggcgattaccgtgagtcctggcagccgcagcagatgagcgacctggccctcgagcgtgcccagaccatcgcccgcaaggtggtgctggcgctgggaggttatggtctgtttggcgtggagctgttcgtatgcggcgacgaggtgatcttcagcgaagtctccccgcgaccacacgacaccgggatggtgacgcttatctcccaggatctctcggaattcgccctgcacgttcgcgccttcctcgggctacccgtcggcgctatccgccagtatggcccggccgcctccgcggtgatccttccgcagttgtccagccagaacgtcagctttggccagctgcagtcggccgtcggggctggcctgcagctgcgtctgttcggcaagccggagattgacggtacccgccgcctgggggtaaccctcgccgtcgccgattcggttgaggaggccgtggcgcgggctaaagccgccgccgcggcggtcatcgtcgaagggtaaagacaaaaaaacccggtcgcgttgccgcagaccgggttgttgacctggaggcgtggtttatttcgcgccttccaccgcttctcgcgcgagggtggtgatgcgatcgtagtcgccggcttcgagggcgtcggctggcaccagccaggaaccgccgatgcacagtacgctgttcagcgccaggtagtcacggtagttggccggagagataccgccggtcgggcagaaacgaatgtggccgaacggacccgcaatcgcctgcagggctttcacgccgccgttggcttccgccgggaagaatttaaactctttcaggccatactgcatacccagcatcagctcagataccgtgctgatccccgggatcagcgggatggtgccgtcttcggtcgccgctttcagcagggattcggtaagacccgggctgatagcgaactgcgcgccggcttccgttaccgctttcaactgctcaacgttggtaaccgtgcccgcgccgacaatcgcgtccggaacttctttggcaatcgcgcggatcgcctccagggcgcactcggtgcgcagggtaacttccagcacgcgaacgccgcccgccaccagcgctttcgccatcggtaccgcgtgctccagctttttcactacgataaccgggacaaccggaccggaggtgaggattgcttctgctgttgttttccagtttttcatcaggattttctctcgccagatctagaaattaaatcgtcttaaaaagtgatgcaggttgcgccctgctccgcgccagagagcttctcacgcagcgccccaaacatctcccgaccggttcccacgcgcgacgcgctgaggtcagggatatgcggctgacgcgccgccagttcggcctcatccaccagcagcgtcagttcccccgtctgtccgttcacgcgaataagatcgccatcgcgcactttcgccagcaagccgccatcatacgcttcaggcgtgacgtgaatggctgacgggactttaccggaggcgccagagagtcggccatcggtcaccagcgctattttgaaacggcggtccaataatacaccaagtggcggcataagtttatgtaattctggcatcccgttcgcttttggcccctgatgacggaccaccaccacgcagtctttgtccagcagccccgcttcaaaggccggcaacacgtcgtgctggctctcaaataccaccgccggcgcttcaatcacctggttctccaccgggaccgccgaagttttcatcaccgcgcgtcccaggttgccgctcagcaccttggtgccgccgtggcgggagaatggtttttcaaaggtcgcgatgacctggtcgtccaatggcgctgtcgccccttcgcgccagtccagctcgccgttattcagccatggctccagggtgtagcgcgacaggccaaagccggccacggtgtgaacatcctcatgcagcaggccgcctttcagcagctcgcgcaccagtaccggaacgccgcctgccgcctggaagtggttgatatccgccgggccgttgggatagaggcgcgccagcagcggcaccacgtctgacaggtcggagaaatcgtcccagttaatgataattcccgccgcgcgggccatcgccaccaggtgcatagtgtggttggtggagccaccggtcgccagcagcgccacgatgccgttgaccaccactttttcgtcaaacattttgcccagcggcatccactcattgccgttgccggtcatgcgggtgacctggcgcgcggcggcggcggtcagcgcttcccgcagcggagcatccggatggacaaaggacgagcccggcagctgcatgcccataaattcgaccaccatctggttggtgttcgccgttccgtagaaagtacaggtccccggcgcgtgataagaggcggcttcggactccaggagcgccatacggtcaactttcccttctgcatacagctggcgaatgcgaaccttctctttattcggcaggccgctggccatcggaccggagggaataaagaccgacggcagatggccaaatgagagcgccgccatggtcagaccgggaacaattttatcgcagaccccgagatacagggccccgtcgaacatgttatgcgacaggccgatggcggcggacatagcgatcacctcgcggctcaggagtgaaagctccatcccgtcctgcccctgcgttacgccgtcgcacatcgccggcacgccgccggcgacctggccgaccgcattggcgctgtgcagcgctttgcggatgatctccgggtagtgttcatagggctggtgagcggacaacatgtcgttgtaggaggtgatgatggcaatgttgttgcgcaacatgctcttcagggaggctttgtcgtcagcctggcaggccgcgaatccgtgagccagattgccgcaggccagttgcgcacgatgcacggtgtcggttttggcctggttaatccttgcgaggtaagccgcgcgggtgtcacgcgaccgttcgataatgcgatttgttacccgtaacattgtcgaattcataaaggctcctcaaatttttatctgtccggccgctgcgtgatgacgtgttgacgtggtaaaggccacaaacaccagcgctcaggggcaaaatgtctgcaggcagtgtaataaaaaaagccccgtgggtgaatcctcacggggcttaaaagattaaaaagcgtgcgactttctgcgtcagatcatgttaccggtaaaataaccctgacggattagcctccagccttactcaaactcgttccatgaacgaccgtcgcgagtgatcatggccaccgacgcaaccggtccccaggtcccggcctgatacggtttcggcgcatcgcggtcggctgcccaggcttcggtaatggagtcaacccatttccacgcctcttctacttcgtcgcggcgaacgaacagcgcctggatgccacgcatggtttccagcagcagacgttcataggcatcggccaggtgcgtctggttgaaggtttcggagtagctcagatccagtttagtgatctgcaggttatgtttatgatcgaggcccggcactttgttcagtacctggatatctaccccttcgtccggctgcaggcgaatggtcagcttgttctgcggcagctcctgccaggtctctttaaacagattcagttccggggttttgaagtaaaccactacctctgagcatttggtcggcagacgtttgccggtgcgcagatagaacggtacgccagcccagcgccagttatcgatatcgacgcggatcgccacgaaggtttcggtgttgctggtcttgttggccccctcctcttcgagatagccaggcacttttttgccctgggcaaagccggcggtatactggccgcgaacggttttctcgcgcacgttggagcggtcaatacggcgcagggatttcagcaccttgaccttttcatcacggatgctgtcggcgctgagatcggacggcggtgacatggcaatcatgcacaggatctgcagcaggtggttctggatcatgtcgcgcatctgcccggcctggtcgaagtaaccccagcgcccttcaatacccacctcttccgcgacggtgatttcgacgtgatcgatggtgcggcagtcccagttattgacgaacagggagttggcgaagcgcagcgccagcaggttgaggaccgtctctttaccgagatagtggtcgatacggtagacctgacactcttcaaaaaactcgccgacctggtcgttgatttcacgggaggtttccagcgaggtgccgagcggtttttccatgaccacgcgcgcaggcttggcattaagcttcgcttcgcccagccctttacagatcgcgccaaaggtgctcggcggcatggcgaaatagttgatggtgacacggttcttttgatccagcatctcacccaggcgggtgaagccgctggtgtcattgacgtcaagattacagaactccaggcgtccgctcagggtatcccacaaaccttcatcaattttttccttcatgaaggtttccagcgcttcgcgcacgactttggtataagccgctttatcccagtcggcacggccgacgccaatgattctggtgtcagcgtggatctggcccgccttttcaagctgatacagggaaggcaacaatttacgccgcgccaggtcgcccttcgcgccgaaaatgaccaggtcgcatgcctgggccgtttgcgttaccgccatgtcattctcctcagttgatagtctggtgcttttgccaggctatatttgtaattttcttacactgcactgtactgtgtttacgtatttcccgaaagccttccccttcgtttgcggcggtaaaaccgcacagggtgaaaacattcggcgatgatttgggcattcggccgttattgttcgttgtttgtacctggttcaggtcagtaaaatacgaccctgatcatgtaatgaaaaaaaacaacatcatttcacgtcattcctcaccgcttgcgcttgcggaggggtatattcttgctaaaacgcccaatgatttcacccattaatgaaatcgtttccattgatgagcgccctgttactaatgaacatgctggaaaaaatccagtcccgactggaacaccttagcaaatctgaacgcaaagtggcggaagtgatcctcgccaccccgagcaggccattcattcgagcatcgccgccatcgcccttgaggccggggttagcgaaccgaccgtcaatcgcttctgccgtagtctcgaaacccgcggattccctgacttcaaactgcatctggcccagagccttgcgcacggcacgctctatgttaaccggaatgtcgatgaagacgacagcgttgagtcatacacgggaaaaatattcgaatcggccatggcgagtttagatcaggtgcaccattctctcgacatgtcggcggtaaatcgcgcggtggatctgctgactcaggccaaaaaaatcgcctttttcggcctcggctcctcagcggcggtcgctcacgacgcgatgaacaaatttttccgctttaacgtgccggtcatctattccgacgacattgtcctgcaacgcatgagctgtatgaattgcgatgacgatgatgtggtggtgattatctcgcataccggaagaaccaagagcctggtggagctggcgcagctggctcgtgaaaacgatgccatggtgatcgctctaacctccgccggtacgccgctagccagggaagccacgctcgccattacccttgatgtgccggaagataccgacatctatatgccgatggtctcccgtttggcccagttgaccgtcattgacgtgttggcgactggctttaccttgcgtcggggggcaaaattcagagataacttgaagagggtcaaggaagcgctgaaggaatcgcgttttgataaagaaccattcgtacccagtgataatcaataaaagttgataacaagcagtaccccattacaccttcgataacgatccggctgtgcgacgttgcaggctggcgctaccgaatccatgttcacgcaacaccaaagttgtatcagtcaacggagtattacatgtccagaaggcttcgcagaaccaaaatcgttactaccttaggcccggcaactgaccgcgataacaacctggaaaaggttatcgccgcgggcgcaaacgtagtacgtatgaacttctctcacggcaccccggaagatcatcagctccgtgccgacaaagtgcgtgagattgcggcaaaactgggccgtcatgtggccatcctcggcgacctccagggaccaaaaattcgcgtatcgaccttcaaagaaggcaaaattttcctcaacgtcggcgataaattcctgctcgacgcaaaccttggcaaaggcgaaggcgacaaagagaaagtcgggatcgactataaaggcctgccggcggacgtcgtgccgggcgatatcttattgctcgacgatggtcgcgtgcagctgaaagtcctcgaagttcaggggatgaaagtgttcactgaagtgaccgtcggcggcccgttgtccaacaacaaagggatcaacaagctgggcggcggcctgtctgccgaagcgctgaccgacaaagataaagctgatatcgtcaccgccgctaaaatcggcgtcgactacctggccgtctctttcccgcgctgcggcgaagacctgaactacgcccgtcgcctggcgcgcgatgccggctgcgatgcgaaaatcgtcgccaaagttgagcgtgccgaagcggtttgcgatcaggatgcgatggacgacgtgatcctcgcctccgatgtggtaatggttgcccgtggcgacctcggcgtcgagatcggcgatcctgagctggtgggcatccagaaagcgctgatccgtcgtgcccgtcagctgaaccgttccgtcattaccgccacccagatgatggagtcgatgatcaccaacccgatgccgactcgcgcggaagtgatggacgtggccaacgccgtgctggatggtaccgatgcggtgatgctctccgcggagaccgccgccggtcagtatccttcggaaaccgtggccgcgatggcgcgcgtgtgtctgggcgcggaaaaaatccctagcctcaacgtctccaaacaccgtctggacgtccagttcgacaacgtggaagaagcgattgccatgtcggcgatgtatgccgccaaccacctgaaaggcatcaccgccatcatcaccatgaccgaatcgggccgtaccgcgctgatgacttcgcgcattagctccggtctgccgattttcgccctttcccgccacgagcgcaccctgaacctgaccgccctctaccgcggggtgacgccggtgttcttcgacagccagaatgacggggtggccgccgcgcacgacgccgtcaatctgctgcgggacaaaggctatctggtctccggcgacctcgtggtcgtgacccagggtgacgtgatgagcaccatcggcagcaccaacaccacccgtatcctcaccgtcgagtaagcacggtagagataaaaaagcctcctgacggaggctttttttatttctttttcgggaacagctctttgcgtttatagggctcgatttcacccggcttgcgcgttttcagcagcttcaggatccaggtatactgctcggtgtgcggcttaacaaacacttccacttcttcgttcatccgccgggcgatggtcgtatcgtcagcgtccagcagatcgtccatcggcgggcgcaccagcaccgtcaggcggtgcgtcttgccatcgtagaccgggaacagcggtacgacgcgggcgcggcatactttcattaagcggccaatcgccggcagcgtggccttgtaggtggcaaagaaatccacaaactcgctgtgttcggcgccgtgatcctgatcgggcagatagtagccccagtagccctggcgcaccgactgaataaacggtttgatcccatcgttgcgcgcgtgcatacgcccgccaaaacgacgacgcacggtattccacacgtaatcgaacaccgggttaccctggttatggaacatcgccgccatcttctgcccgccggaggccatcagcatcgccgggatatccacaccccatgcatgcggaacgagaaaaataaccttctcattattgcgctgcatctcgtcgatgatcgctttcccctgccagtcgacgcgggcaaggattttctgcggatcgcgcaggcccagctcggccatcatcaccatcgcctgcggcgccgaggcatacatggcgtcgatgatcgcttcccgctcgtactcacttttttccgggaagcagtacagcaaattaatctgcgcccggcggcgcgagcttttcgccagacgccctaccagacgaccgagtttgccgaggagcggatcgcgaaaggatggcggcgtcagcgcaataccggcgaaggcaaagacccccagccaggcgccccagtagcgcggcagtaaaaaggatttttcaaacttagggataaactcaatattattttttttcgtttccatgcccaatccgcagatcgactgcttaatcaagataatgggatagtgtagcgagacgtcgggtatcctacaaaagaaaaagccggcgccctggggcaccggctttccactgaccggtggttagtcaaaccgcagctgcggaacgacctctttgacctgtgccagatagtcggtccggtcggaaccgctcagcccttcggtacgcggcagcttagccgtcagcgggttgaccgcctgctggttgatccacacttcgtagtgcagatgtggcccggtagagcgtccggtattccccgacagcgcaatgcgatccccgcgcttcactttctgccccggcttcactaacagcttacgcaggtgcatgtagcgagtggtataggtgcgaccgtggcggatcgcgacgtaatacccggcagcgccgctgcgtttggccacgactacttcaccatcgcctaccgccagcactggcgttccctgcggcatcgcgaaatcgacgccacggtgcggcgcgacgcggccggtgaccgggttcagacgacgcggattaaagttagaggagacgcggaactgacgcgccgttgggaagcgcataaagcccttcgccagacccgtcccgttgcggtcgtagaatttgccgtcttcggcgcggatggcatagtaatccttaccgtcagagcgaagacgcacgccgagtaactggctttgctcacgtttgccgtcgagcatttcgcgcgacatcaataccgagaattcgtcgcctttcttcagcttacggaaatccatctgccactgcatggccttgatcaccgcgttgatttccgtgctggtcagcccggcatcacgcgcgctggagacaaagctggcgccgacggtgcccttcagcacgctgttgacccaatcgcctttctgcagctcgctgctcattttaaaaccgttatccacacgggtataggtgcgggtctcgcggcgggacatctcccaggtcaggctctgcagatcgccgtcggcggtcagggtccaggagagctgctggccaatcttcaggttgcgcagctctttatcggcggaggaaagctgggcgatatcgcccatatcgataccgtactggttcagaatactgctgagcgtatcgccggtcgacaccacgtattcgtgcccgccggcatcgctatcggctttttcgtcgagctcatcctgaggaatggcttcttcttcctgcggggcctggtcgatcggctcggaggcttccggcagcagggagcggatctcgcttttttccagttcaatggttctgacgatgggggcggattccgggtggtaaatgtagggtcgccagacggcgaccgctaaggtaagaacgctaagcgaccccagcataacgcgatgaggtcgtggcagattgttgaatgcctgagtgacagcgcgggctatctgttgcacgtattcacttcctcgttaatctcctttcaggcagctcgaatactgattcgccagttgggtgaggaattgcgggtaactcgttttacccagcgtaattcctgtccccagtggatccagggtccccatgcgcacagacgtgccccgggcaacagcttcgataaccgctggcctgaactgtggctcagcaaaaacgcaagtggctttctgctcaaccagttgtgttctgatttcgtgtaaacgctgcgcaccgggctgtatttcagggttgacggtaaagtgccccagcgaggtcaaaccgtagtgtttttcaaagtaaccgtaggcgtcatgaaaaacgaaatagcccttccctttcagcggtgccagctcattgctcacctgcttgtcggtcgccgccagcgcggtctcgaactgctgcaggttgctgtcgagtttggctcgactctgcggcataagttccaataatttatcgtggattgcaaccgccgaaagccgcgctatctctggggataaccacagatgcatattgtaaataccgtgatggtgatcgccgtcacctttttctgctgcgccatggtcatgaccatggtgatcgtcatcgtcgtccgccccggtgatgagcagcggtttgaccccatccagctcggcaatcgtcacctttttattcgccgcaatgctttgcgtcgacttatccataaaggcttccatttccggaccaatccacaccactaagtctgcgttctgtaagcgttttacatcagaaggacggagggaataatcatgctcggaggcgccatcgggcagcagcacctgggtctcggtcaccccatcggcgatggccgccgcgataaagcccagcggtttcatagaagtcaccacggcggcgctggccagcggtacctgcgcgaacaaaaaaacagcgccaagtccagcgcaaagaagcgtatttttatgtaacataatgcgtctagtcatcgaaataagtgagtttgatgtgatattataacattcactagcttgtgcaacccctaaattactatgacaaaccttgtaacgctggaaaatgtctcggtggcctttggccaacgccgcgtgttgtctgacatctcgctggctctcacgccaggcaaaatcttaaccctgctgggccccaacggcgccggcaaatcgacccttgtgcgggtggttctcgggctggtagcaccgacagagggtgttatcaagcgtgacgcacgcctgcgcatcggctatgtgccgcagaaactgcatctggacgccacgctgccgctgaccgttagccgcttcctgcgtttgcgcccgggcacccgtaaagacgacatcctgccggcgctgaagcgcgtgcaggcggggcatctgatcgatgcgccgatgcaaaagctctccggcggcgaaacgcagcgcgtactgctggcccgcgccctgctcaaccgtccgcagctgctggtgctggatgaaccgacccagggtgttgacgtcaacggccaggtggcgctctacgatcttatcaaccagctgcgccatgaactggactgcgcggtgctaatggtatcccacgatctgcatctggtgatggccaaaaccgacgaagttctgtgcctgaaccagcatatctgctgctctggcgcaccggaggtggtctccatgcacccggagtttatctccatgttcggcccgcgcggcgcggaacagctggggatataccgccaccaccataatcaccgccacgaccttcaggggcgaattgtactgcgtcggggaaacagccgctaatgattgaacttctgttacctggctggcttgccgggatgatgctggcctgcgccgctggtccgctgggctcctttgtggtctggcgccgcatgtcttatttcggcgacacgctggcgcatgcgtctctgctcggcgtcgctttcggtttattgcttaacgtcaatccgttctatgcggtgatcgtcgtgaccctgctgctggccggcgggctggtgtggctggaaaaacgaccgcatctggcgatcgataccctgctgggcatcatggcgcacagcgcgctgtccctggggctggtggtggtcagtctgatgtctaacgtccgcgtcgatctgatggcgtacctgttcggcgatctgctggcggttacgccgcaggacctgatcgccattgccattggcgtggtgattgtgattggcattctgctctggcagtggcggaatctgctggcgatgaccatcagtccggacctggcgtttgtcgacggcgtgaagctgcagcgggtcaagctgctgttgatgctggtcaccgccctgactatcggcgtggcgatgaagttcgtcggggcgctgatcattacttccctgctgattatcccggccgccaccgcccgccgttttgcccgtacgccggagcagatggccgccgtggcggtgggcgtgggcatgctggccgttaccggcgggttaaccttctcggctttctatgataccccggccgggccgtcggtggtgctctgcgccgcggtgctgtttattctcagcatgacgaaaaaagccgccagctgaaaatgaaaaagcccggtcacgctgctgaccgggcttcaccatgaactgctcaaccgcaacgcgctacggcatttccggcggcgtaatcccgaaatgattccaggcgcgcaccgtcgccattcttccccgcggcgtacgctgcagaaagccctgctgaattaagtagggctccagtacatcttcaatggtttcccgctcttcgccaatcgcggcggcgaggttatccagccccaccgggccgccaaagaacttatctatcaccgccagcagcagcttacggtccatatagtcgaacccttccgcatcgacgttaagcatatccagcgcctgggcggcaatatcggcggagatggtgccgtcgtggcgcacttccgcgaagtcacgcacccggcgcagcagacggttggcaatacgcggcgtgccgcgtgaacggcgggctacttccagcgcgccctcgtcgctcatctccagccccatatggcgggcgctgcggctgacaatatgctgcagatcggggatctgatagaactccagacgctgcacgatgccaaagcggtcgcgcagcggcgaggtcaacgaaccggcgcgggtggtggcgccgatcagggtaaacggcggcagatcgatcttgatggaacgcgccgccggaccttcgccaatcataatatccagctggtagtcttccattgccggatagagcacctcttccaccaccggcgagaggcgatggatctcatcgataaacagaacatcgtgcggttcgaggttggtgagcatcgcggcgagatcgcccgccttctccagcaccgggccggaggtggtacgcagattcacccccatttcattggcgacgatattggccagggtggttttccccaaccctggcgggccaaaaatcagcaggtgatcgagggcgtcgccgcgcagcttcgccgcctggataaagatctccatctgcgaacgcacctgcggctggccgacatactctgccagcaattttgggcggatggcgcggtcagcggcctcttcaaagccgctgctgtctgccgataccagccggtctgcttcaatcatcccttacctcacaacgcagcgcgcagcgcttcgcgaattagcgtttcactgttggcgtccggacgcgcgatcttgctgaccatccggctggcctcctgcggtttatagcccagcgcgaccagcgcggcaaccgcttcctgctcggcatcgtccgccgttgggcctgccggcgaggtcagcaccagatcggccgccggggtgaacaggtcgccgtgcagccctttgaagcgatctttcatctcaacgatcagacgttcagcggtttttttgccaatccccggcagcttcaccagcgaggcgacctcttcccgttcaacggcgttgacgaactgctgcgccgacatgccggagaggatcgccagcgccagcttgggccccacgccgttggttttaatcagctctttaaacagggtacgttcctgtttgttgttaaatccatacagcagctgggcatcttcacgcaccacaaagtgggtgaagacgatcgcctcctgcccggcctccggcagctcatagaagcaggtcattggcatatgcacttcatagccgacgcccgccgtttccagcaacaccagcgggggttgtttttcgagaatgatgcctctgagtctgcctatcacgtggggctcctgcgttatggtctaagtatctggcggtatcataaaaaaaggctggatagatatccagcctgatttgcgattatcgtaagcgcccccgcgccagattgagccgggtctcgctgatctgagcggcattctggctgacatggcaatgggtgatggcaatcgccagcgcatccgccgcatccgcctgcggattggcgggcagcttgagcaaggtgcgcaccatatgctggacctggctcttttcggcgctgccaatcccgaccacggtctgcttgacctgacgggcggcgtattcaaacaccggcagcgcctgattggtcgctgcgacgatcgccaccccgcgcgcctgcccgagctttaacgccgagtcggcattcttggccataaagacctgctcaatggcgaaatagtcgggctggaactgggtgatgatctccgtcaccccggcgtagatcagcttcagccgcgacggcagatcgtccactttggtgcggatgcatccgctgcccaggtagctcagctgccgcccaacctggcggatcacgccataaccggtaacgcgcgaccccgggtcaatgccgagaataatagccatcacgcgcctccggttaaccgtggatgcggctgcatcacagggtggctgcgacctcgtcggagatctcgccgttatggtacacttcctgcacgtcgtcgcagtcttcgagcatatcgatcagacgcagcagcttcggcgccgtctcggcatccatatccgctttggtggacggaatcattgagacttcggcagcgtcggctttcaggccggcggcttccagcgcgtcgcgcacagcgcccatctcttcccaggcggtgtagacgtcgatggcgccgtcgtcataggtcaccacgtcttctgcgcctgcttccagcgccgcttccatgatagtgtcttcatcgcctttctcgaaggagataacgcctttcttgctgaacaggtaggagacggaaccatcggtgccgaggttacccccggttttggtgaaggcgtgacgcacttccgcaacggtacggttacggttgtcggacagacattccaccatcaccgcggtgccgccaggaccgtagccttcataaatgatggtttccatgttcgcgtcttcatcgccgccgacgccgcgcgcgatggcgcggttcagggtgtcgcgagtcatgttgttagacagcgctttatcaacggccgcacgcagacgcgggttggaagccggatcgccgccgcccagacgcgcggcggtgaccagctcgcgaatgattttcgtaaagattttaccgcgtttggcatcctgtgccgctttgcggtgtttggtgttggcccatttactatgacctgccataaaaaactctccaaaaagcgcgccctttcaggcggcgttaattacaaattcttcaatcgcctgccggttgctccacgacttggtcagcgcagcggcttccgtcgcgctgacccagcgataggccagatgttcggtgaaagtaatctcccgctcatgaggcagcgcaagacagaaccagaattccgtattgcgctctacacccggcgcatagcgatgacgcaaatgagaaaatatctcgaactccaccgtgcgctgacagtcgattaaggtcagttgctcgcaggcaacgtcaatggcgacctcttcctttacttcacgcgcggcggcctgcagcgcggtctctccagcttccaggctgccggtgaccgactgccagaacgcgggatcgtcgcgccgctgcaacatcagcacccgtttcgtatcttcggcgtaaatgaccaccagcaccgaaacgggcagcttaaatgacatattacttgttctccagagacgcttttgcctctttctccacaacctgaatacccagctcaccgagcgccgccggattggcgaagcttggcgcttcggtcatcaggcaggcggccgcggtggttttcgggaaagcgataacgtcgcggatgttatcggtaccggtcagcagcatggtcagacggtcaagaccgaaggccagacccgcatgcggcggcgtaccgtacttcagcgcatccagcaggaagccgaatttctcacgctgttcctgttcgttaatgcccagaataccaaatacggtctgctgcatctcgccgcggtggattcgcaccgaaccgccgccgacttcataaccgttaataaccatatcgtaggcgttggctacagcctcttccggggcggctttcagctcatccgcggtcatatctttcggcgaggtgaacggatggtgcatcgccgtcaggccgccttcgccgtcgtcttcgaacatcgggaagtcgatcacccacagcggcgcccatttgctctcgtcagtcagactcaggtctttacccagcttcagacgcagcgcgcccagcgcgtcggccactactttcttgttgtcggcgccgaagaagatcatgtctccatcctgcgcgccggtgcggtcaaggatcgcttccacgatttcagcggtcaggaatttggccaccgggctgttgatcccgtccatgcctttggcacgctcggtcactttaatataggccagccctttcgcgccgtagatcttcacaaagttgccgtattcgtcaatcagcttgcgggtcagagaggccccgcccgggacgcgcagggccgccacgcgccctttcggatcgttggccgggccggcaaagaccgcgaattccacagacttcagcaggtcggcgacgtccaccagctccatcgggttacgcagatccggtttatcggagccatagcgacgttcggcttcggcgaaggtcatgatcgggaactcgcccaggtcgacgcctttcacttccagccacagctgacgcaccatcgcctccatgatctcacgcacctgcggcgcggtcataaaggaggtttccacgtcgatctgggtgaattcaggctgacggtcggcacgcaggtcttcatcgcggaagcatttgacgatctgatagtagcgatcgaagccggacatcatcagcagctgtttgaacagctgcggcgactgcggcagcgcgtagaatttgcctttgtgcacgcgggaaggcacgaggtaatcgcgggcgccttccggggtggctttagtcagcatcggggtttcgatgtcgaggaagccatggtcgtccataaagcggcgcacaaagctggtaattttcgcgcgggttttcaggcgctgcgccatctccggacgacgcaggtcgaggtagcggtatttcagacgcgcttcttcggtgttgacgtgattggagtccagcggcagcgattctgagcggttaatgatcgtcagatcggaagccagcacttcgatagcgccggtggccatgtccgcgttgatgtttttctcttcacgcgcgcgaacggtgccagtgacctgaatgcagaactcattacgcagttcagaggctaacttcaacgcatccgcacgatccggatcgaaaaacacctgaacgatgccttcgcggtcgcgcatatcgataaaaatgaggctaccgagatcgcgacggcggttgacccaaccacacagagtcacctgctgcccaacgtgggactgtcgaagctgtccgcaatattctgtacgcatgagatatcccttaacttagccgtcggcggattgtcgtctgccctgcaggcgacgaggtcgcagctttagctgatgtcacaactgaatgaaaaaaggcggctattatactggaaattctgtcgttcgataagtccgacgcacgatgtacgctgctttgctgcgcgcttaacgtccacactcacataaattaacaaaatttgttactcttttgctgaagccgcaaaggtattgtagccgcctgacaacagatgaagatacggggataccatgttagaactcaatgcaaaaaacacggcgctggtggtaatcgatctgcaggaaggcattctgcctttcgccggcggcccgcatcgggctgacgaggtggtggcgcgcgccgctcgcctggcagacaagtgccggcaacagggttcgccggtcatcatggtccgcgtgggctggtcggccgatttcgccgaagcgctgaaacagcctgtcgacgctcaggccggggcgcatacgctgcccgaaaactggtggacctacccggccacgctgggtaagcaggagagcgatatcgaagtgaccaaacgccagtggggcgcgttctatggcaccgaccttgagcttcagctgcgccgccgcgggatcgacaccattattctctgcggcatctccaccaacatcggcgtcgaatccaccgcccgcaatgcctgggagctgggttttaacctggtcatcgccgaagatgcctgcagcgccgcctccgccgagcagcatcagggcagtatgacgcatattttcccgcgcatcggccgggtgcgcagtaccgaggagatcctcacggcgctatgatttatattgggcttccccagtggtcgcacccgaaatgggtgcgccttggcatcaccagccttgaagagtacgcccgccactttaactgcgtggagggcaacaccaccctgtatgcgctaccaaagccggagattgtcgcccgctggtacgaacagacccacgatgacttccgcttctgcttcaaattcccggccaccatctcgcaccaggccgccctgcgccattgcgacgagttaagcagcgaattttttgcccgcctggcgccgctggcctcgcgcatcggccagtactggctgcagctgccggcgacgttcggtcctcgcgatctccccgcgctatggcattttctcgacggactgccgaaggatttcacctacggcgtcgaagttcgtcatcccgagtttttcgccaaaggggaagcggaacagcagctcaaccgcgggctgcacgagcgtaacgtcaaccgcgtgatcctgaagagacctttctattgatacactctaaagatgggattttgtagcggggattaagcggcttcaagcagatgggacagtgcaatcattcggattcgttctggtgaatatccggctagacgatactttctaaccaactcatatcctacacggtcaaggttatctaaagcgggtttagagagcttcacaatgatgttattgctattgtctccaccttctgaatggaacggtgcaacggctgctgtagctgttatacgggcaacctttggttttggcttaggcggctgacgtgtctttgaacagtccacgcaactacccgatgagatatagcgaacagttgagccgcaatgaatacacggcttatcaggggtgttaatcgtggttgtattagacattggttaagagtccttctaagtattctgtaattcgggcttgctgtgtacgttttgagccatcaccagcacggcgggttaacttatccattaactgaggatgaatctttccgataaggtttgctccaataaccaaacagccgttagagtcgtaatagttaataggtgcgttaattgtctcttccattttatcagctcccgcttaccatccgtttaatagcagcctttaaagctgcatccctttgctgttcaactgttggcggcttaggcttcaccttatacgtggtgacagctttagctggtttcacagttggtttaggtttattacctgaagcaagtagcttataagttgattcactgatttctgcttgaccgttgaaatatttgtattcgaccgaatcagttagattattatagctcccgcgttttgttagtcctttcattggaatactcattcggacacctcttcagaatcagttacaatcacgtttaaatagctttcaaatgatttaatcgaatccagagttttacgggcttgggtaacaatcacattacgctggtggacagcttcagaggcttttaccttcagacgttcagtcatattatcaatataactctcagcttcagcagttgccttgtcagttgcgtctttcagagcattctttttagttgagatgaaatagattaatcccattcctacacgatgaaccatgtagccttgttcagccattgactgaataatctgctgttggttcgttggataaacctgcttcacaataaatccgtgacgctctgaaggggatgctaagaactcttgagctttgcgattaatcaattgctggcgtgattctactgcatcctgatattcagcttcagccttattcattcggtcagttgcctgttgaatccgtgggaagtacaatttttcgatatgctgtttctgttcgaacggtaacaggtgactgattgaagcaactggtgattcaatttttacagcttgatgtaaagtagtcattattaatttactcttagtctggtttgcttagatttcagaaagcacaaaaccccatccagccaactcaatgttacgggacgaggttcaatgttttctaattagggtttatctgtcttctcaaggggaacttgaaatggatgccttaaaaagacagataagaaggaaattgtttgagtcagaaataagtcggtgatttgannnnnnnnnnnnnnnnnnnnnnnnnnnnnnccattctgtcatatattaacaaattgtcaacgtttatttttaatcttttcacagattgatttaatgagtaataagcgtcttgctttggtcatcagtttggggatgtgatattccttgttaggaattggactaatcaaatcaccaatcttccgtaactcagtatggatagtgtgacaggttctccctgttactttgtaatatcttctcattcataatcgaacctttctcaatgcaaataaaaaaggccactcataagagcagcccttttacattgctttctcaaaacctcttgaacgacctgcaccagtattttgagatttaagcaaaaccagataaaacaattatcacatgataactctaatctgtaaaactcaaacagacattaatcgcccaaatgttcagcattaatattcaggtcttcaaagccaccagttaaaacctgtgtctggaatgttccaattttctggctatccatgttcacactaatattaatgcgctggtcattcttgatagttgtctgagcagggttatacattgatggtacagcaaatgtattagtctgaccgttcagtgcattgttaccctgaagccaatcaccaaatgaacccatagcacgtgtgaacgggctgttagtgattgaatcaccatcctgagcacctaacaccttagaagggcttgaaagccagttaagagcctttgcaatagggttatcgacacctaaagcggttgggtacttctgttcaactcctgaagcgtctacagcatcatgagcgactaaagcaactcctacagggccagctaaacgggaagcacctttcagcatcccacctgcaccagcagccgcaccagcttcagcaccaccacctaacagagcacttaaccatttcagcttattggctactccagcgatagacttaaccagcaccaatacaccagcagccccaatagcgaactgttcagcagaatcaaccagtttcttttgaccgtctgataagtcatcgtaccacgctgaagttctgaggattaacgctgagagtttacggctccattcgtccacgtggtcaaccgccccagaggtcatagaggcaacttttccgaggatgtgacccaaagcctctgcgattggtgaagcatcgttaagcatgttagctacagaagcgttaaactggcctaaacccttttcagagcttgtgaaagccttgtttaaatcgttttccatcgctgctttaacacgtccgatacctgttacagccatattagaaacggtctctaatccccctgcttcatcagccattttcttcatctgagcagatacacggggaagaacatctttagacagtaacttaccgttactcatgagcttatcaagctgctgagtgttcacacccaaagcatctgcgaacatctgttcagcacccggtaaacggtctcccaactggcctctgagttcttcagcctgtacgcgcccttttgatgccatctgtgtgaatgctatcatgatgcctttaagctgttcagcatcaagccccctgatgcgaccgaatacagcagcattcttatagaagtcctgtgtaccctgatagcctaacgagttctgagcaccagcagcaaagccagtgtactgtttcaaggtctcagtgacaccctgtccgatttggtcagagaactgagccgcgaatgtcttagcatttttcgattgccccttgaaaacagcttcagcggagagattcacaccttcacgggccacacctgtttcaaccaccttacggacggcttcaaatgtcccatataacgctgctgaaacgcttaccagacgcccgaaggagcttgataacccttctgcattagatacctgcttacggttctgagaagcccatttagacgcgctgtcagtggctgcacggagagctaaacggaactggttcaggctggctgaaggattggctaaagcatcatctctcaatccgtgaatctgctgacgcaatttcatcgcccttgcttgtccagttgaacccataccctcaagacgtctggtcagattcgaatagaactgagtgttagcaagtgaacggattgaattagaagctgttaaatctgagcctctgccttgtggctttccggctggtggatttgagcggccttttcctttagctccataggcgtcctgatacatatctttaatgcgctttgcagaagccttagcagcgttctctacagatttcaccgatgatttaccagcttcatcaaaatccatactctttgagaatgcacggttaatttgttttgatgcgttatttgctgaagaaattactcttccaaaatcaccctttggtgtgaatgaacggttgagattcttttcgattcgttcagcgacttttaatgttctgctttcgagtttttgaagattctttgaaacgttttcgttaaagcccaattggatgataaattcatctacagtatagttagccattcatatttttaacctcatattcattccagattaaatctgtcattgcatcgtgtgccttgagtaccatttcatagattagtgcagcacccatcagtgatagcccttgaccgctgaagaatgtagcaatagtgatttggttaatctctggaagagttttcaggactgttaagcataactctggttcagataccgaattaaaaattgcgtctgttaaatcgggatgcggtacaggattgtttagcatattcaaaaatcggtttttcattggttcatttccttcattttcttgttgagtaatactgctaatgtttgctgtcgtggcaaatcatacttttcacttaactggttcagcagttcaagagtcttagctgaaagattgataactgagcgttctttcttattcgacattattcaattcctctttcaggataatttctaaagtctgctgacggttcaggccgtacaattctgataacgcttccagctttttcattaacgctggtgcaatgtgaattactgagtgtttcattttacaattcctcgtaaattggcattttaaatggctcgtcgtcttcctctgcatcagtagcaaacagataattcagtttactttctggtttaggctttggtttagaaagacggataataactggttcaatctcttctacagcgtcaataactggattttcattcctttcgattaacgggaaaggtaagacattatcggaatcactggtgattgcggcctctgattcagatactgattcaggtttattttcttgctggtggcttttaatcaattctggaggcatgatttcaactgtgtataccttagagctatcataacgctgaatagaactaataagacctgattcatgtaattgggttaaagcccctaaagcaacctttcgcccaataccgaacaattcacacaggtaattgattgaggggaagacttcttgaccgtttctttgaagacctaccataaacaggtaaatcattttagctgaaagagataacttaacaccgttgaaagaagtgattcgggttacatcactataagcgggggtaaacgggatttcatagagtttcattcatgggattttcctaatatcagaaatgcctcttaacaaggccgtatattgttcgatttaagctgtgactacattttcacgaatcatgtttttaatcagggctgagtagctcacaccctgtttagctgccatttcaacaattttacggtgaatggcgtgggacacttcaacacggatagttacctgttgtgggatgtcttttctcattgggatttccttcttgcaattcaataagctatataaatactgtaacaacacattaacaatttgtcaataaatttgtttgacttatttttcttgatggtgtaagtgatttcgaaataatgaataggggggtataccaaaacggcatggggggtatgtcataaagggataaggggtatgccaaaacggcacagggggtatgccaaaagggaacactataagactagagataagattagaaannnnnnnnnnnnnnnnnnnnnnnnnnnnnnnnnnnnnnnnnnnnnnnnncatgatttatttacatcaaccgattgtaattgattgttttttatgctaccctaaaacctcttaacagattctttttgttctttgtttttcatcttcttgtctctgagtatcttttaagagttctttaaagaaagcctttctaaacctcacctgctttcagctcatcggtgattctggtttccaccttgtagcttgacagtaaatcatgtagggatccgtgaaagcggctttgaagctggtggatgaattttcacaaatattatttttctaaaaaatcttcagacctgtttttatttcagcttcaccagaaacttccagcatatctaaagcaccttctaagattttggatagtctgaatctctctacttggtagcgaccttttctaaggtttcgtaccaatggcaaaaaatgaacatatctgagcctgtgcagcgttctaagcgattgtttaatgatagcaaccctgccccataggttaataataaagactgcttagaatgcgttacagggattctgataaacgacagacataaaaaagccccaatacaggggcattgtgaatcactatctaattgttacttgttcagtcgatagaaagttgccttactaatctgtaactctttctgtacctgagcaggggaacaaccttgtgcaatcagttcctgaacctgttcagcggttgctttaattggtctgccacagtgaaccccttcggactgagcacgtttaatccctgctgttctacgctctgctattaggtctttctctaaagaggctaaaccagccatcatagtgagcattgctttaccaactggtgtagagaggtcaaacccttcacgcaagctgataactttcacacctttggcctgaagaagttcaaccgttgagagaacatcaatagtgttacggcctaatctgtctatcccgataacaaccagtgtgtcaccttcacggacatagtgcagtaggtcagagaaacctttacgctctgtagccttaaccccacctgatacagcttcatcggtgaaccacttagccacttgataaccagcttcttcaatctgctgtttctggttggtaactgtctggtcagaagttgatacacggacgtaagcgattacagatgacatgatggtgattccctgaaagttgtctcaaaacctagtttcaaaataatacctgtatcaaaactcaaattcaaccttttgagacagcctaaacacacctttttagacctttttcagcagtatcaaaactatctccttttgaggcaatccaaaccattgaaacaggttatataaatactgattcttatctcttttcggaactaaaacagttaataggctagagctattgaaatcactggtgttgataggggttttaacaccatttggagagactgttttttactgttaatttagccatctaaacggctattcttcagcgttagcaagtcattgaaggggtcattatggaaatttcaagaatcgaaaaggaaatctggctaaccatagcggctaaataactgtctcacaaactaacttttcactaagatgataaggatgactcagcataaggagcttcaaaggaaatgaaagaaaccatttataacatcttctgcttttgtcctgatggagttcacatcacgcattgcggaatcgttgctcatgattttgaaggtgacgataatcaaaagctggaatttttaagaaaacagttagacattgatttagcctcctgtaggtcatttcatgacattcacccttcggtgcttgatggtgacaaacaactaactctggcaagatataattcgaatatgagggtaggaaacaatttagccccttttgaattagctctacaggctatgaatgccccccttcaccctttatctattgttacgccagtggtagaaggtaaacttcattatcacatccaactatcattgtctgaacaactaaggcataagcacatgccccatcaccacatagaaggtgttaaaagcttccctgattaccttgatgattacatgaaagaagatggttttcatattaagaaattactcaatgacgaccatatgaagcccatcagaatgctttttaatgaaaaacattacctgtctagtttcaagctgttaatgtccttcattgacaccattgcttacattgaatatggtaattccaaaagggttttccaaaactggcttgatacttactcagaaattaaaaaacttgaaataacatctgatgaattatatgagttaagaaactcactcttacacatgactaacctgaattcacataaggtgacacaaggcaaagagcgccgccttagtattgctgtttgcaaacgaggccacccaactcagtgtcacgctgacattgtttatttgaactttacagattttttatttttatttgatgaagctattgataaatggcttgatacttatcgtgacagcaataaacagttaacgtttattgaaaggtatgatgaagtggtgagggataactattaaaccttcataaggggctgtttcgcccctattcattcaccgaactcgtaccaattgaggcatccctttaaaagggactaatcaacgaattgagccatcagggtaaagatacattccaccttcaagataaactggttcaccatcttcaacagccatatcttcatatagtgctgctaattcattcggttctttttccagtgaaagatatgtctcaacatcataatcttgtgcttctaattcttcatttgaagagacacctaatttttgctttaaagctacaatatcaaaaatccaaatctttccatccttgacgtaataagcaccattatcgtaaccacgctcatcaagaaccttttcaaagcccattgtaagagctttgaacacgctatgttttttgttagacataactacccctgagaatatttttgtttgagcaataagttacccctttagagggcttactcaataatcctgtaagtgtcaaagtcgaactcatcagcttctaacaggggtaagacttctaagaaaatttccccatcaacaactctatccagtgggaaatttaacaatttcaagccgttgtgtaagaagacatcacacttcttttgagccgtgtttagtcgaatctctttcactatccgtttgatgatgatttgagcctccaccctgtctttcttcacagtcaaatccaaatggctgattgtctcaagctggcttgattgctctcgttggtgaacctctgagacagccttttcagcgtccttaatttgactattcagggctttcaaatccttagccattgattcggtatcatctgccagcatagccagcttaatgagcctctcacgctgtttctgaagctgttctaactcactttgaagagagcctatagcagaggctttataactattcagggtaaggcggttagtgttgtaaagcagcccctgaaccaatgcgcggtcagtctgtaatctgctgaacccaacactattacagcgcccttcactcttcatcgagcatttgtatataccagacctcttagcagagacacccgcaacaacgacaataaacccacactcagagcacctaagaacgcccttgaagagatttgttagcaaaggtaggtcagaggaaggtttacgccctgaaccctgcttaagctgctgtacagcgtagaattgctcatcggtaattattgacgggtaatagttaggaatctctgagaccccctttacagccattgatttagaaggaactttgaaaccaatcactgaacggtttgaaagtaactcagtgaccgacgattgagaccagccacctgtaacggatttgaactggttcagagtggaaaacccctcatcattcatttgtttggctatcttgacgtgagacaagccctctaaccgtagctgaaagacacgttgaacagctttcacattctcagggatgaattcaaagtgtgaacggtcttcagagacctttaaccatgctgcacaacgcttagacatgatttcacctttagcagccctttccctcttagcagcccatacagaccttaaacgggttgatttcatcgctgattcttcgtgtgctctttccatcaccagcattgctttaatcatgctgagtgaatctttgagactttctttcgtgtaccactcgttatcgacaagtgtcaccacttcaacgccagacctgagaatttttctaagctgctcacctgctgtgtcgatgtcctgacggcttaccctgtccagagattcgacaagaagaactgaacccgcttcaatgtagccagattccacagcggctagaaattcactgaaagcccctgacttagcattagcgccagagaagccgcttatacccaaatcctgaaagcgtagtgattcgtctaaatagtaatcaggattcctttttaaccagtcgttaatgtacttgctttgacgcttagtagaatcaccaactgattgaatcttagtagaaaatcgtatgtatgagattgcttttggcatggtgtttatgatgagttatgaagagattgaagaagtgtatcataagaaaggtgtaattctcgacagccgcccggtccatagcgctgcggccaccagtccggcgatgatcgatgcccaacaaaagaaaccgaaggtgccggtacatgcggtgatgaccgcccgacagccaatggtgcgctttatcggcggtgacgatatggcccataaccgggaactgtttcgcgtctggctgcagaccctggcgaagtggcatcagtcggggaccccgtggttgttcctgcatactccggacattgccttcgccccggcgctggtggataccctgtggggtgacctgcgcgctgccctgccggcggcaggaaatgcgccgtcgattccgcagcaatcttctcttttctgatatcctgctatcatatccggagccatctgccagagttaaagggagttttcgtatggtcagcgcgctgtatgccgttttaggtgcgttattgttagtgaagttctcatttgacgtggtgcgtctgcgcacccaataccatgtaggctacggtgacggcggctttagcgagctgcaggttgccatccgcgttcacggcaatgccgtcgaatatgtgccgattggcctcattttgctgttatttatggagatgaacggcgctcagacctggatggtgcacgtttgcgggattttattgattgtcgggcgactgatgcactcctggggctttcatcaccgcgtctactactggcgccgctccggcatgagcgccacttggtgcgcgttgttgctaatggtgctggccaatctttggtatatgccctgggagttggttttctccctccgttagcgcacaatacgccgttttcgttttttcgggtttaacgttatgtctcaccgcgatacgcttttttccgcgccgattgccagcctcggcgactggacctttgatgaacgggttgctgaagtcttccccgatatgatccagcgttctgtgcccggctactccaatatcatctcgatgatcggcatgctggccgagcgcttcgttcagcccaacactcaggtttacgatcttggctgttcgctgggcgccgccaccctctccgtgcgccgcaatattagccatccgggctgtcgcattatcgccatcgataactctcccgcgatggtggagcgctgccgtcgccatattgacgcttataaagcgccgacgccggtcgaagtgattgaaggggatatccgcgacgtgaccattgaaaacgcctcgctggtgatcctgaactttactattcagttccttgagccgggcgatcgccaggcgatcctcaataaagtctatcaggggctgaatcggggcggcgcgctggtgctctcggaaaaattcagcttcgaagacgcccacgttggcgaactgttgttcaatatgcatcatgactttaagcgcgccaacggctacagcgaactggagatcagccagaaacgcagcatgctggaaaatgtgatgctgacggactctgtcgaaacccataaagcccgcctgcgtcaggctgggtttgaacatgccgaactgtggttccagtgctttaactttggctcgctggtggctgttaaagccggggagcaggcatgatcgacttcagtaacttctatcagctgatcgccaaaagcccgctgtctcactggctggagacgctgcctgcccaggtagccgcctggcagcgcgatgccctgcacggcaagtttcgtgaatgggagcgcgccgtagaatttctgccggagttaacgccctggcgtctggatcttctgcacagcgtcaccgccgagagcgaaacgccgctcagcgaaggccatcagcggcggatcgaaaatctgcttaaaaacctgatgccgtggcgcaaaggcccttattcgctgtacggcatcaatatcgataccgaatggcgatccgactggaaatgggagcgcgttctgccgcacctgtccgatctcactggccggactatcctcgacgtgggctgcggcagcggctatcacatgtggcggatgatcggcgccggcgcacatctggcggtcggtatcgatcccacccagctgttcctgtgccagtttgaagcggtgcgtaagctgctcggtaacgaccagcgggcgcatttgctgccgctgggcatcgagcagctgccggcgctggaggccttcgacaccgtgttctcgatgggcgtgctctaccaccgccgctcgccgctggaccatctgtggcagctgaaagatcagctggcgccagggggcgagctggtgctggagacgctggtggttgaaggagatgaaaatacggtgctggttccgggcgaccgctatgcgcaaatgcgcaacgtctattttatcccctcggcggcggccctgaaaatgtggctggagaagtgcgggtttattgacgtgcgcatcgtcgacgcctgcgtcacctcgacagaggagcagcgacgcaccgaatggatgacgaccgaatcgctggccgatttcctcgacccacaggatcagcgcaaaacggtggaaggatatccggcgccattacgggctgtgatcattgccaccaaaccggaaacccagcagtcgctggcgaaaaaagcgagataaaaaaaggcccctgtttaatgggcaggggcctggtacgggcaatcatcatattgggcgacatgatgtgcagcaaaaaaccgtttaacttctccaggcggagataatccttttcatctccgccaccgctgcgccattcacggcgtagcgtctgtattcatcggcatcgggatcggctgacatcgaaacgcccggatgacgaaagcgcatttccgacggcaaccagtggccagcagagctatggacctctttcacccccgcctgcagaaacagcggcaggttcgcggcgcggactcccgcaccggccataatgattggagtatcccctgcggcaataagttccgtaattaatgaaatacctttctccgccgaggattgctgaccggaagtcaggatacgtttgacccccagctcacccagcgttttccaggcctgacgcgggtcagcgcacagatcgaacgcgcgatgaaaggtcaccgccagcggccccgccgcggccattatttttttcatccgcgggatatcgacctggccatcagcatccagcacgccggtcaccagcccgggaaagcccagatcccgcaccatgcgaatatcgttaagcatcgcggcgaactcttcctcggtgtagcagaaatcgccgccgcgcgggcgaacgatcggatgcaccgggagagtaatcgcctcgcgggccgagaccagcaccccataagagggggttaatcccccttcctgcggcgcggcgcagagctcaatacgatcggcgccgtagcgctcagcctcccgggcgcacgccacgctgtagcaacacacttccagtaccgccattcctctctccctgatccagacaacctttgcagcatgtcacaatttcacgcggcagacgccgcgcggcttcacactgttacgtatcggcttgctcgctggcgacgatttgttcaatagaccacggatgaaatttgaccgtcacgctgccgtcggtcaccgccagggtaggattcggcaggcgctcatgctcccctttcggcgagctggttttgaccacgatccccggctggctgagtccgtcatcggccagcagcgccagagcgcgggcatttaaggttgccggatcgccgggcaggacgatttcgatatgctcccagccttcatggggataacgcttttcacccggccacggcagctcaacgatatggaagcgccagtgcgccacgcagaccggctccgccagtttgaacaagcaaatgggccggccgttgatcatattctccgacagcagggtgccgcactgctccagaccgcggcgccagcgttccgcagtggtattctgatgacagcgtagggagatatggtcggcgtcgagcccggcgatctccagtcccagtcgcgcagtgaagcgctcaagcgcatcggaaaatcgcgggagatccgccgtaatatcggccagttgttcattttgctgccagtttgccatgggtttgctcgtcaataatgctcgtcagtaatgaaaaggtaatttaccgtgtttcggcctgcggaccaaccgccgccccgctgatgggcaactgaccggcgatggattgcgcacgccggcgcgccgcgcgcaatgctgacggacggggacaaatgcagtatactcccgccctaatttgtccacattatggcgccgcctccctcgggggcaggcgcattacacgtaaggtattccggtgaatattcaggctcttctctcagaaaaagtcagccaggccctgatcgcggcaggcgcccctgccgattgcgaaccccaggtccgccagtcagcaaaagttcagttcggcgactatcaggccaacggcgtgatggctgtcgccaaaaagctgggtatggcgccgcgacaacttgcagagcaggtactgtctcatcttgacctcaacggcattgccaacaaggttgaaatcgccgggccgggctttatcaatattttcctcgaccccgcgtttctggcggacaacgtcaaccgcgcgctgcaatctgagcgcctgggcgtcacgaaaccgcaggcgcagactatcgtcgtcgactactcggcacccaacgtagcgaaagagatgcacgtcggccatctgcgttcgaccatcattggcgatgcttcagtccgtaccctggagttcctgggtcataaggtgatccgcgccaaccacgtcggcgactggggcacccagttcgggatgctgatcgcgtatctggaaaaacagcagcaggaaaacgccggcgagatggccctggccgacctcgaaggtttctatcgcgaagcgaaaaagcactatgacgaagacgaagccttcgccgagcgcgcgcgcagctacgtggttaagctgcagggcggtgatgagtacttcctgcagatgtggcgtaagctggtcgacatcaccatgtcgcagaaccagatcacctacgatcgcctgaacgtcaccctgacccgcgatgacgtgatgggtgagagcctgtacaacccgatgctgccggggatcgtcgccgatctgaaagccaaagggctggcggttgagagcgaaggcgctaccgtggtcttccttgatgagtacaaaaacaaggagggcgaaccgatgggcgtcatcatccagaaaaaggatggcggctacctctataccaccaccgatatcgcctgtgcgaagtatcgctatgaaacgctgcacgccgaccgcgtgctctactacatcgactctcgtcagcaccagcacctgatgcaggcgtggaccatcgtgcgcaaggcaggctacgtgccggactccgtgccgctggagcaccatatgttcggtatgatgctggggaaagacggcaagccgtttaaaacccgcgccggcggtaccgtgaagctggcggatctgctggacgaagcgctggagcgcgcccgtcgcctggtggccgagaagaacccggatatgtcggctgacgagctggaaaatctggcgaaagtggtgggtatcggcgcggttaaatatgccgacctgtcgaaaaaccgcaccaccgactacgtcttcgactgggataatatgctggcgttcgaaggcaacaccgcgccgtatatgcagtatgcctatacccgcgtgctctccgtgttccgcaaagccggcatcgacgaaaacgcgatgatcgacgcgccggtggtcatcgccgaagatcgcgaagctcagctggccgcgcgcctgctgcagtttgaagagaccctctccgtggtcgctcgcgaagggacgccgcacgtgatgtgcgcctacctctacgatctggcgggcctgttctccggcttctacgagcactgcccgatcctcagcgcggaaagcgaagagacccgcaacagccgtctgaagctggcgctgctcacggcgaaaaccctcaagctgggtctcgataccctcggtatcgaaaccgtcgagcgtatgtaacaagcaacccggcgaaagccgggttagttttattcggcgcctcgccagcggggcgccctgctcagaagtacttgcgtagatactccgtcagacaaaggatcgccatcgcctgaccgtagggcatcgaggtaagcgggatctggcgataaaagtcgagatctgaccccatcccggtgccaaatgaggtctgcagcagctccccctgcggcgaaatattctgcacaatcccgcgaatcgctttttcagccaccccggcgtagtgctgcccgacgtaacgcttgcgcaccgctttgagaatcccgtaggcaaagccggcggtcgccgaggcctcaagataagagtgcgggtcgtccagcaaggtatgccacaggccgctgtcgtcctggcattctgctaaggcggcaatctgtgcgtcgaggactgtaatcagatagcgccgtaccgcattcccctcggggagatccaccagttccagaaaatccgggatcaccatggtgagccagctgttgccccgcgcccaacgcgcccgggcaaagttatgccgcccctcatagttccagccgtgaaaccacagcccggtctcccggtccatcaggttctgcacatggagcaggaactggtaggttgcctcctccacatactgggggcggttaagcagcttgccaattttggctaacggcaacacggtcatcatcagcgtgtcatcccacatttgctgatggttctcctccgccagagtcatgtgctgcataccgccctgctcggtgcgcggcatctcgtgcatcgcccactccgcccagctctccagccacggcagatacgccatacggccggtctcttcaaagcggtaagccagggtcagaaacggggccatagtattgacgtttttggtcgttgctccctcggcgaagcggtcggcaaaccagcgatcgatgatatcacgcatctcgatatcgccggtttgctggtaatactgatagatgccgtacagcccaacgccgtgggtccactcccagccggcccagcctttggtatcaatcacgcgcccgtcatccaggcgtagtaaaaattgcccgctctcatccttaatattcaccaggttttgcgtcacgttgcggatcagcgcctgcagttcgctacgggcgataaaacgctcaggctgacgcaataatgggctatgtttgaccggccaaactttcatgttgttaacctcgggtatatgtcgaattcaaagcgccgcccttaatgagcgccggggcagcaggtttatgacgattcagatagccaatattgttattgccccacagacagtcgtaaggcatccccgccagcagctcgaccaccgcgcggtgttccgcactggtctgttccgactgagcgtagccgagctcgcgcattctgagggtctcgctgcgcaggacgctgtgggtgtgcaggttgagcttgaagcgcagcgagacgaggaagccgcaggctaacaccaccagagtgccgacgctgaggatcagcagaatggtatggctgaccccttcaggctgtattttttgcccggaaacaaaccccgacaactgcataatgatccccaccagcatcaccgcccccgcctgcgaggctttgcgggtcagagtcatgatgccggcaaaaatcccctcccggcgctggccggtgatcgcttcgtcgacgtcggcaatataggtgtaggtattccacggtacgtaatttatcccgccgcgtcccagtccggcgacagcagagatgagcagcaataaggaatagacgtcgctcagtccggcgtaatagagcagcgcgtaggagagtgagctcaggccaaacaggaccaccaccatgcggtacgacggcgcggggccaaaacgaatgcacagcgggatcatggcgattactgcaataaactggaagatggccatcgtccccagcaggttcgaggcgacggcggcttcctgcatcagaacaaagaccacgtaataggtaaacacggcattgaagacgtcctgggcgatatagccccccagatacatgccgaggtgctggcggaaaatttttatccgcagcgtagaactcagctcaatcaccaggcgattgaggctctgagcaagggttaagttttgtttttccgcttccgcccgcagggccgcttccgaccacgcctcccgcggtcgttcccaggtgaaacaccagaccagagtcagcatcaccgcgcacagcaccgagaacaccagactggcatagaagaacgagctggcattatctttgccgagccaggagagaaggatccccggcaggaaggaggctaaaatcgccgacatctgcgccatcgaaatgcgcgcgccggagaatttggttttctgtttaaagtcatcggtcatctccggcaccagcgtctcatagggcaccagaatcatggtatagaccatatcaaacagcagataggtcgccaggtagtaccagaagcccatctcgccgacccacatcgctgaatagctgaatacgcaggggatgccgagcagaataaaggattttctgcggccgaagcgcttaccaagccaggtggtgccaaagttatcggtgagaaagcccatcagcgggcttaccaccgcgtccagcacgcgggcggcagcaaaaataagcgtggcctcaatcggggtcagtccgcaaaaggtcgtgtaaaagtagagcagccatgcggcggttagcgccgtcgtgccggcgccgagaaaatcgcccgcgccgtaggccagatagttagccagtccaatttttcgtgttttcatcgccgtgatcctgtgtcttttttttaaaagaacgccgacaatcgttccggatttgccaccggaagggagtgggtacctggctacactaaaagctgtgaaaggaggttacctttgtacttttgccacggaacagtcgccggtggcaaaatgacaaagagatgacgtcgccacttcactcatttataaaacagcatttctttttaatcaaaagacaggttcattgatgtgatctggttggaaggtcgccgactaacgaacaggctcgcaaatcccgggatcggcccttgcgcagtcggggaaacaggagtaaagaatggaagaaagggttattccgcgtatctcaaggaggccagatgccttatacccatctgctggttgccgtcgcgccaacgccggagagtcaggtgttaattaaaaaagcggtgtcgatagcccgccccgttaacgcgaaagtgagcttaatcactctcgctacggatccggagctgtataaccagttcgccgcaccgatgatggaaaatctgcgcgaagtgatgcaggaagagacgcgggagtttctcaatgaacttgctcgccacgcggactacccaatagaaagaatgaccatcgcctgcggcgagctaggccatcatattaaggacttctgccgctcgcaccgtgttgatctggtgatctgcggcaatcacaaccattccctcttttcacgcgccacctgctcggcgaaaagtatcgtcggcagctgcggcgttgatgtcctgttggtttcccttgaaaagggctaacgccggttagcccttttcctgaactaggccagtttagggaaggtggctatcttcccccgcagacggctctcctcgctgcgcggtgaaatatgctgcagatcctcgacaaagcgcgcctgccagttatgaatatcattttctctgatcacgtccagcatcgctgaatgacgggcgatacgttccgccagcggcatgctgagcgcgcgatccagcgcggcggcaacctcgtcgcgatcgtaaggattgacgatcagggcgctggtcagctcctgcgccgccccggcaaactgcgacaggaccagtacgccagggttatccggatcctgcgccgcgacgtactccttcgccacaaggttcataccatcgcgtagcggcgtcaccagcccgacgtcagagtagcggaagaccttcatcagcagcttacgatcaaaatgctggttcagatagtagagcggtgtccagccaagctgaccaaactgtccgttgatgcgtccggctgcggtttccaactggtggcggatatcctgataggcctgcacatcgccgcgggaggtcggcgcgatctgggtataacggattttgccgtggtgctgagggtacttctcgagcagcgtctcgtaggcgaggaatcgctccggcaaccctttcgaatagtcaagacgctccacggagaagatattcttcacatttttcagctcgttcttcagctgggctagcttcggcggcagcggacctttagcgttgcgcgtaatttcgtccggatcgatccctatcggataaacctcggtactgaacgccttaccccatgcctgatagcgtttatcgccgaggtcggataggcgagtctgcatagcaatgctgtcgagaaaagcggttctgtcgctttcggtctggaagcccagcagatcgtaatcgcacagttgctccagcagctcagcgtgcggcggcagagcgttaaaaatctccggcgtcgggaacggaatatgtaagaaaaacccgatgcgattgttcaccccgcgcttgcgcagctcgctggcgaagggcagaagatggtaatcatggatccacagcgtatcgtctggctcaatcagcggcagaagcttgtccgccagcatggcgttaacccgcagatatccctcccaggcttcgcgctgaaagctgaccagatcaaggcgatagtggaaagccggccacagcacggcgttagagaactggttgtagtattcatcatggtcccgttcattaaggttgaacgacgcccatgaaatattcccgcgggagacctgcttgagcggctgctggtcatcgccaatctcgccgctccagccaaaccacagaccccccgccgctctcagtgcccccaggatgccgacggccagaccgccagcgctcgattttttatcgtccggtaaggcgatacggttagagactacgactaaacgactcatggtcatccctcctttcggtttgcgcgtcatacgccagatgttgcaaccacgtccttacagcggcggcatccgccaaccgccaatgcgcctgagtttccccggcgccaacttttaccgacattccctgcagttgattaacgacgctgaatcccgcctcgtcggtcaaatcatcgccgacaaataccggttcgcggccggcgaatggcgcctcctgcatgaacgcggtaatcgcctcccctttgttgacgccgcggggtttaatctccaccacgcacttgccaagctgtaacgccagcagcggatagcgctgaacaatccgctgcgccagctccagcacggcgctctgctgctgcggggcctggcgatagtggagcgcgaaagccatctctttactctccagctcacatcccgggagcgcttccagcgccgacgtcagctcagccgcgatctcatcgcgcagcgctgtcggcagagagacgatgtaggttttaccattgatatcacggcgctcggccccgtgaacgccggccagcggtagccgccagggatgggttagcgcgtcaagttcagccattgagcgccctgaaatcaatgccaccgcgcccccctgctgctgggccagcgcattgagcgcctgcagcgtgctgtcgggtatcaccacctgatcggggtgcggctggatatcggcaagagtaccgtcgaggtcaaagaaaaaagcgtagtttccggttagcgcaggcggtacagatatctggttatccaccctgtttcctccttatcatggccagccgaagctggttgttaattatatgtgagccatgtaagtatagacagtgtgaccaacctcgccatttttgatagttaccgccagcgaaacgggcgctggcggcaattactctgtaaactaaaaagttgggttaaaattcaggccgcacgtttggctttttgtttgtagcggtcgaagatcaccgccgccagcaggatcaccccgcgcacgacgtattgtgagaatggcgagatattcagcaggttcatcgcattttccacggttccgaggatcaggatcccggccaccacgtaggagatcttgccgatcccgcccttcagcgacaccccgcccagcacgcaggccgaaataacaatcagctcatagccaatcgaggtcatcggctggccgctggtcatgcgcgacgccagaatgatccccgctgcggccgataccagaccggagagcacaaagataataatcttggtgcgcaccaccgggacgccggccaggcgcgccgcctcttcattgccgccaatagccagcgtattacggccaaaggtggttttgtttagtaataatccgaaaaccaccaggcaggcgacggtcagccagatcggcgccggcaaaccaaaccagttggcgtagccgagggtgaagaaacgttcatcttcgatccccaccgctttgccgtcggagataatataggccaggccgcggacaatctgcatggtggccagcgtggtgatcagcgcgttgatcttaaggcgcgcaatgacaaagccgttaaccaggccactaagcgcccccagcaacaggcctgcggcgatccccagccacaggctttcgctgagattaatcaccaccgcggtggtgaccccggcgcaggcgataaccgacgccaccgacaggtcaaaatcgccggaggccaggcaaaacagcatgccgcaggccaccatcccggacatcgagatcgccagccccagccctttcatattgacgaatgaagcaaagttgggcacaaaaatcacacagccgataaacagcaccgcaaacaccaccagcatgccaaactgatcccagatgcgggcaaagctaaaggttgagcgggtagccccggacgtagtcactgatgacatcatttactccttactcaggcgacagcctggctcactgttggcatcgcaaggcttaacgcctgctgttcattggcttcttcatgcagcagttcgccggcgatttgtccttcgcgcatcaccacgatgcggtcagcgacgcccagcacttccggcaggtcgctggaggcaaacaccacggcgacaccggaggcggcgaggccatagatcacattgtaaatttcatgtttggcgccgacgtcgatgccgcgggttggctcatcaagcaggatcaccttcatctcttccgacagccagcggccaaggatcgctttctgctggttgccgcccgacaggttcataatcagctgttccgggcccggcgttttaatattcagcgactggatatgttgatcggcgttgtccgcctcccaggcgttgttgatcaggcagccagcgtgaatatgcttgcgccgggcgctgatattgatgttatcgcgcacggaatgcaccggaataatcccctccgctttacgatcctccgggcacagcatcatcccggcctggatggcctgggccggtttgcgaatggagacgggctggccatcgatatacacctgaccgccggttatctgcgtgccgccaaacaggcctttcattagttcgctgcgcccggcacccaccagtccgaacaaaccgacaatttcaccgctgcgcaccgagagactaaccggcgtgcgcacgcccggcgctttgacctcttccaggcgcagccgctcctcgccataggggcgaggcttccagccataaatatcgcccagattgcggcctaccattgcctggaccagggcgtcgtggctgacgctcggcatatcgtcaaaggtgcaaacgtagcggccatctttaaagacggtgatggcatcgctgagggcaaaaatctcttccatccggtgtgaaacatagatgatgacccttccctcctcccgcaactcgcggatgacgcgaaacaggttgtcgatctctctggcggagagcgagctggtcggctcatcgaacgcgataatcttggcgttacgcgccagcgctttggcaatctccaccatctgccattgaccaatggagagatatttcagcggcgtctccgggtcgatatccagacccagatgctccagctgcaggcgggcctcatagttgagcagcgagcgattgacgatgccgcctctgtgcggcagctgaccgagatagatattttcggcgacggtcatctccgggatcagatgcagctcctggtagatgattgccacgccggcattcagcgcctccatggtattggcgaatgccatctgctggccgccgatctgcagatggcccgcggtcgggatatagttgccgctgagaattttcaacagcgtcgatttgcctgcgccattttcgcccatcagcgcgtggatctgtcccgggtagcagtcaaaactgatatcggacaaggcctttacgccagggaacgtcatggtgatgccgcgaaatgagagataaggggtagactgttgcataacgactccgctcttctgcactcagcccccgcgccgcggcgggggccagtttaatcaggctgttacagcccttttttcgccagctcttctttgaagttatcgcgggtaatcagcaccacatcggtcaccgccgtgaacttcggcggctcgacgcccttggtgacccagttgtagagcatttcgctggttttgtagccgtggatatccgggcttggcagcagagaaccatagaagccggtcggctgcgccttcgacagttcgttgacggcatccacgccgttgatgccgatgccaatcacatcgggagctttaaagccctgaccttcggtcgcgcgcacgccgccgaggacggtgttgtcgttcatcccgacgatcagccagtgtttaacctgcggatgctggaccagcatcgagttaccggcgtcgaacgctcccgggatatcgttggattttgtcggcacgcggtagatttgcgcgtccgggaaaccggccgccttcagggcatcgatggagccggtggtgcgacggcgcgcggtatccagctcatcggcggtgatcgccattacggcggtgtctttgacatcccagccgcgcttttgcatctctttatagagttcctgcccctgacgggcgccaatttcgctcgccgccatcatcaccagcggtacgctctccatcggtttgcccttcgcattgacgaactggtcatcgacggtaatcaccttcatgtcatagccacgcgctttggcgacaatcgccgacccgagcttgggatcgggggtacagatgacaaagcccttcgcgccgctggccgccaggctatcaatggcattcagggttttctccccatccggaaccgcaattttaataacgtcaaagcctaaatcttttcctgctttatcagcaaatttccactcagtctgaaaccatggctcttccggctgtttcaccagaaaacccagtttaagattttccgccatagctgattgtgacataaccgcagcgagaccaatggccgccagcgctttagtaaatttgtgcatggtaaactccagctttaattcgctttcatgtagggaaaaatcggaattaacaatttaatcggcatcaaaacaaggcattagaaaaatcgcattccccactgccgttgttagagtagtaatacccggaaattatttctccatacgagagcattatcacatcgcggaattacagtaattgcgtacatacatttagcaaaaaatgacataaaaaatgacacaattgtcatacaattttaccggggcatagcaggatcatctataccatcagcaggcttatccttgtgttgtcagaggatgtttaacggtgggttacagcactgttatcatcagcgattgacggcgctgctacgggcgatcgcctgtgcgccactcaaatggcaacccacctcgcaccgctgagccacatggcccgcttaatatcgcgaaaaaacggatctttggcgtaatttattccgaatagaaaaaatatattcctctttataaaagcgcctgcaacaaaaaataaaaataatgatcatcaacctgaaacattactaatgaaataacttattccgttctcttctacgacgaatctcgtagtcaaatacttatatcttataaccaatctgaaaccagcgagcccctgccaacggcgcacaatctcagccctggtagtttgcaaaaataatggtgtaacaaaacgtaaattaccgcgcttgagagttttcttaatttcgttaagcgagtattcttaaatcgtcggcaaatggaaaaaatacccgacttatacggaatgtgtagagttttattattctgcaacagtgccgcgtgtcactattttatcttgtagttatccgcaggatccgctgacgcgcaccagtaaccccttcccggttaataaggatattttttatggcagttccaggaatggcacaaaagctaaacacccaaatgaatcttgagtttcacgcctctaacgtttacctgaacttaagtgagtggtgcgcccgacatcgcttcgacggcgccgcgacgtttctgcgcacccgcgcgcaaagcagcatcaccctcaccatgcgcgtatttgactacctgaaaaaagccggcagctggccgatcgtcaatcccgaccacgcctgtaaccctgagtgcacctcgctggaagatctgtttacccaaaccctgagcgattaccaacagcgcagtcgtctgctgagcggtctcgctcaggaagccaaagcgcaaagcgatgacagcacctggcggtttctcacgctgttggcggaagagcagcagcaggatggcctgctattgcaaagcgtgcttgaggaaattcgtaatgccgataaagccggtctcgggatggagcagaccgatcggcgtctgatggctatcgttggagaagcgcagaaagcgcattaatcaagcctttatcgctctgccagggggagcgcgtctgcgctgccccgcccggtttattaatccattacgtctattttttctcccctattattcctttcaagaataaaaaagttttaactcgatcccattccctcatcaccgttaccccataagggggattagtgagcgcggtcactttttgacgaaccataaagaaatataaaaacagtgtttcaaaaatataaaacacgaggtttattttttatggctagatacacggcttcagcctctgaagggctgcagggaagaccgatcttgttacgccatcagttagcctacggcggcggaaatctgttagggagcggcgcactggcgataagcggcgcatggctactctatttttatacgaccttttgcggcctgacgctgatcgaggcctcatttatcttctccgtcgccagcatcattgacgctatcagcaacccgctgatgggctatctgacggataattttggcaaaacgcgcctgggcaagcgcttcggccgccggcgtttctttctgctaatcggtattccgctgatgatgttctacccgctgctgtgggtggaaggcctgagtttctggtactaccttagcacctatgtggtgtttgagatcatctacacctctatcatggtgccttatgaaacgctggcgacagagatgaccgatgatttctcactgcgttcaaaactgaccggctataaagctatctttggtaagctggccaacttcctcgcggcgtttattcccggccagttcattctgctgtatggcaaagattctgccacccctttcttcctcaccggtctgacctatggcgcgatcctgatcgtcgctatttcctgcctgtggttgtgcagctgggagcgtgagcgcggggaagaggtggaaaccagcgcgaaaaaaggactgctgagcaccctgctgtcgctggcgaaagatatgcgttcgactttttatctacgcgtattccgcaaacatcttggtatgtacctgtgcggctttggcgcggaatggctgtttgcctccatcttcacctatttcgtgatcttcgttctacaacacgatccagcgatggtggccgggctgaacagcctgaactcgattctgcagctgatctctacggcgctgtttatcggcctgtgcgtgaaaaagggcttcagcaaaccctatatcctggcgctggggatcgtcattttcgcggttctgctgtatacctcgctgtggtttttccatctaccgtccggcctggcgacagtgctgatgttcggcattaccgtgctgttcggcctgggtaccggcggggtttactatataccctggaccgtttacaccttcctggccgatgtcgatgagatctacaccggacgccggcgggaagggatctatgccggcgccatgaccttctcaggaaaaattctgcgctcgattgtggtgttctcgatgggggcgatcctgagcttctacggtttccagtcaaaagcgcacagccaaccggaaagcgcggtgaccgctatcgcagtggtattctgcgtcggggtgatcgcattagccctggccgccatcgtcttcagcaagcagatgaagctggaccggaaggcccatctggtggtgctgcaggaagtcgcgcggataaaagcgggcggcaaaattagcgatattgcgccggacgtgcgggttatcgtggaggatctggtcggccatcgctacgaagagtgctggggcaacagcaaattgttcaaagatgctgcccctgcgcctgcgcagaccgtcgtttcccattaaagaagaaggccccgccggtatccggcgaggcctggtattaatgcgtttcttcctgtggagtaaacttcagctcaatcaacgcgatcgctttttgcaccgcgcgaagggtcaccggatcggcagaggccggatggctggcgaagtcgatagctttgagctgagtggtcattttttcacgcacttccaccggcgcaatgacgtcaatgacatcgaggatctgtttgataaccagctggcaggcaaccacatcggaaaccagctcgtcgtgttcggtaagatgttgagacattaattactccttttttcaggagcgtaatagtaccctaaatcgttaacgataataaaacctgccgtcgcaggtttttttatctactctactggctggcgggtcgtctcctgccgctttgcacaggatcacactcttgatggcagtgacaacatgaataccgcgatctcttcccgcgatgaacgtgctttttcagcgccggcgctgctggtggcaggtgccttttttatggagtttctcgacgggacggtgatcgccaccgccctgcccgatatggcgagggattttggcgtcaccgcggtcgaactgaatatcggcatcagcgcctatctgattacccttgcggtcctgatcccggccagcggctggatcgccgatcgcttcggcgcccgggctatttttactctcgccctggcgatctttacccttgcctcggtcttctgcggcctctccaccgaggtgcatatctttgtcgccatgcgtatccttcagggagtcggcggcgcgctgatggtccccgttggtcgccttgcggtgctacgcaccacgccgaaacaccagctgatcaaggccatcgccaccctgacctggccggcgctggtggcccccattatcggcccgcctttgggcggctttataacccgctacgccagctggcactggatcttctttatcaatgtcccgctgggccttgccgccatcatcctttcgctgcgcattatccctgatattcgcgaaacggaacggcgctccttcgatctcagcggatttatcactacctcggtcgcgatggtcagtctggtgaccgcgatggagcggctcggcgatcgccagccgcagatctggccgacgctggctctcgccgcgcttggcttcggctgtctgttatattccattcgtcatttccgccgggcggcggcgcctatggttcgtctcgacgccctgcaggtgccgacgttccgggtgacaatgtacggcggctcgttgttccgggcctccatcagcgcggtgccttttctgctccccctactgttccaggtgggattcggtatggatccttttcattccggcctgctggtgctggcggtgtttgtcggtaatttaaccattaaacccgccaccacaccgctcattcgctggctgggctttcgtcggctactgctgatcaatggtgcgttgaacgtctgttcgctgctggcttgcgcgctgcttacgccgcagacgccggtctgggccatcatgctgatcctttatctcggcggggtgtttcgctcaatccagtttaccggtgtaagcacgctggcctttgccgatgtccccgccgcgcagatgagtgatgccaatacgctgttcagtaccgcgtcgcagctggcggtagggctggggatcacgctcggggcgattggcattcgcctgggcgagcaggtcggcgactggctgcatcttactgaactaccggggatcagcttccgcctgtcgtttgtgtttatcgccttgatctgtctggtagggatgatcgacagcctgcatctggccaaaacggccggcagcagcgtgtcggagaagaagaaatagaagaaaaaataaacgacggaagggccagcggcgctggccctgatgacggttaagcgacgatctggcgaacaaagtcttcgattgctttatcctggcagttttcgaagaagcactgctggaagcgtgggccggagactgcggttttcaccagctgcggatcgatggcgcgcagggtatcgaggtagttctcttttactactgctgctttgacctggttgaggatcccggcattgcgcacctgcggttctttgcgctccggcggatagccttcgccgttgcggccggtaaaggctttttcaaagataaaccgcacattcagttcggcgccccagccgaagcctttggcaaacggcagcgacagcgcattaccgttgttgatctgggcaaacaggaacgcatccgccggatcgatacagtagccgcagaccacgcccggatggatgttcagcgacatcagcgccccctgaccggtaccgcagccggtgaccacgaagtcaactgctttcgaattcagcagaatactggccatgatcccaagatggatgtaggtcagatgatgatcgttctcatcgctcatgccgacgttatagaccgggaatcctttttcgtcggcaaccgcgttaagctccttgaggatgatggcgtttttgttcgcctggctgttctccatcatcagtgcaatcttcatggtttactctcctgaatgctgtgcgggcctgcccgcagaatgtcattggcgttgactgcactctactaccttgaaaacaaactttcaaattttatgaaaagttgttttaaaatttacgcagtgcttcacactttcgcaggctccctttgtctgttgacctcagccctctgcatgctggcgtatccgcttcgtcctcccttaccacccgccggcgacaaaaccctgaccgcccaggcaataatgaataataaattaaaagcattctcatttattattaaactgccaatgcgtgttattcccattagcattttaaataaaacatttttaaatttactttttgcaaataattaaataacaaattatagtggcagccaataacatctattatttaattccaggagtgcaacgatgctgaaaacggacatgattgacaaactcaatgaacagatgaatcttgaactctattcttctcttctttatcagcagatgagcgcctggtgcagttaccacagttttgaaggcgccgcggccttcctgcgtcgccatgctcaggaagagatgacccatatgcagcgcctgttcgactatctaaccgacaccggcagcctgccgcggatcaacgctatcgcctccccgtttgccgaatatgcctcactcgacgagctgttccgccagacctacgagcatgagcagctgaacacgcaaaaaataaatgaactggcgcacgcggccatgaccagccaggattacccgacctttaatttcctgcagtggtatgttgctgaacagcatgaagaagagaaattatttaaatcggtgatcgataaactgaccctcgctggaaaaagcggcgaaggtctgtactttatcgataaagagctggctaccctcgacgcgcagaattaatcccccgcgccgcgacagtccgtgtcgcggccctcttaatgtcggcagatcttattttctgcggtagtaaaaccttcctctctggcaataaatttgccttttttctctaaaaacgccaccagctgtgcggcgcttagattctctgctgaacaggtgtgaaaccgcgcctcttcgccaaagcggcggcgaatggcggcctccagcgaggcgaccgtccaggattcacccgaggcgagcatcatctgtaaaacttcatgaccatgaatagaagacataacccctcctgcaaaaaccgccagcttaggccagaccgtcaacccgcgccttgcgccagcgcaggctttcgccctcttattatgtaaacatttcattacacaacttgtaatcccgatttgacgaaagccgtaatatcccctactctgcgcggcataatttattgttatttgctgtagggatagcgaaaagcgtgaaaaaccgcactctgggcagtattttaatcgtagctggcaccaccatcggtgcaggaatgttggcaatgccattggccgccgcaggcgtcggctttaccgtcacgttgggtttacttttcaccttgtgggcattgatgtgctataccgcccttttgctgctggaagtctaccagcatgtccctgccgatatggggctcggttctctggcggcgcgctatctgggccgttatgggcagtgggttaccggattctgcatgctgtttctgctgtacgccctcacggcagcctatatcagtggcgccggtgaattactcgcttccagcctcaaccagtggctggactggcagctaccgccggccgcaggcgtactgatcttcaccctcctcggcggggcggtagtgtgcattggcaccgcgctggtggatttgttcaatcgcttcctgtttagcgccaaaatcgtcttcctggtgattatgctggccctgctgatgccgcacattcatcaggtgaacctgctgacgctgccggttgagcaaggcctggccctgtcggccattccggtgattttcacctcctttggttttcacggcagcgtcccgagcatcgtcagctatctgggggggatattcgcaaattgcgccgggtatttatcatcggcagctttattccgctggtggcctatattttctggcagctggcgacgctgggcagtatcgacgccccggcctttaccgccctgctggcaaataacgctggtctgaacggcctgctggaggcgatccgcgaagtggtggcgtcaccgcatgtggagctggccgttcacctgtttgccgaccttgcgctggcgacgtcattcctcggcgtctcgctcggcctgtttgattatctggcggatatgtttcagcgtaaaaacagcgtcggcgggcgtctgcagagcgggataatcaccttcctgccgccgctggcgttcgccctgttctatccccgcggtttcgtcatggccctcggctacgccggggtggcattagccgtgctggcgctgataatgccggccctgctggtcatgaagagtcgccgagagcatccgcaggctacctggcgggtcgccggcggcgcaccgacgctatggctggttctgctgtgcgggatcggcatcgtggctattcagttcagcatcgctgccgggttgttgcccgcggtgggataaaaaaggggcctgctggccccttgttcatttcgctaagcaacactgcttatactttttaccgctgccgcatgggcagggatcgttgcgtccgactttcgcttcatttcttattggctgcggggcctccaccggctgcggattcgctatccagtactggtaaagcgccagcgccgccggcgtgatacgctcgatgctggcgataaattcatccgccgtcagattatccagcgcgctaaactgttcttcgctgccgtggagcgcgatagcgtccagctccggctggagttcagcgggcaacgtcgaccagtcgctcagcgccacgccgcgcagatagccaaagcaccactcctcaactatggtcagctcctgaccttccgcttcgcgggtgccgaacagcggttcgaactgatcgggataagactccagccgttcggcgatatcgctcatatgctgcagcgtcagattgacaaagcgatcgcgctcgcgatcgttggcccagcgcgggacattatccgccccgccccaaatcgccagcagccactgagcgggttcgatgtcggtcggcgcagagaggatcgccgtcagcaggccatccagttcagagacatccagaatggcgccttcggcggcgtatttcgccagagtgtcatccagccattccagttcgttttcgttcaaaggtccggtattcattcacaggctcgcatggcaaaaatcgggcctacagtagccgaattgccgacagaaagccacccggcgatacctattgcgccggtgtcaacgatacgcgatcaggccaggccgcgcagcgccgacgccacctcacgacaggcctcctcccctaacgaaagcaaaggacggggaagcgagtctggatcgcagagtccgagcatcgctgcggcgctggctatcactcgcaggctaccaccatagcgatcaaagcatcgccatagggggccagctgctcattcagtgccgcagtctgcgccacatcgccgctacgtatcgctcttaccagcgccagtgagaagcggggaaagagtccgccgcagaccgaataccaggcttcgcagccggcctgcaacccggcagtggcccacgcatcgccgctaacgccaagcgtaacgcgagagggaagatgctgacgcagggccgctacacgttcgctcgcctgtggcgcgggcaggccgggaattttaatcgaggcaatggccggcaaggcggcgatgcgcccctgcagctcatccgccagcattacgtgggtagtgcggggattgtcatacaggcaaaccggcaccgagacatgccgacagacctcttcgtaaaaggcaaagatctcctccgcggaaagcggctgataggacatcatcggcagtaataacgcatccgcccctgcctcctgagcatcctccaccaggcgtagcacctcgttagtcgcaatggcgccgacgccgaccatcatcgggatcgaccccgcatgcgccttcgccacctgcaccactcgtctgcgctgctcacggctgagataagcgtagctaccggttgaacctaagatgcccagagagtcgactccggcatcggtaagacgggcgagaatacgaataaacgctttttcatcaaaattttgctgatgcaaaggtgtcaaaggaaatgcgcaaagtccagtgaacatgatgcctccggcaggctgggctgagagtccgtttgatagtagcaaggcgcgatcgttttgtcctgggacaaatgagaaattgactgtaaggcaagagttaaccgaaaaacgccgtggcgtcaggctggcgggaaaggtatcagaaagcgaaagtacagaaacaaaaaaaccacccgtaggtggtttcacgacactgcttattgctttgattattctgtatttcccaatggtacccggagcgggacttgaacccgcacagcgcgaacgccgagggattttaaatcccttgtgtctaccgattccaccatccgggctcgggatataaagtggaggcgcgttccggagtcgaaccggactagacggatttgcaatccgctacataaccgctttgctaacgcgcctttaatactgaagcacccgcaactgccgatgctgttaatctggagcgggaaacgagactcgaactcgcgaccccgaccttggcaaggtcgtgctctaccaactgagctattcccgcatcatcaagttatttgctaatcacttgattttgttatcgtctggaagactgtgccgccgttcgatgcgttgcattctacttatctctcgcggtgagtcaacggtatttttcgcaactttgtatcgtttgctgaaaataacggcgaaacgatcactgatcaagcaaatcgccgcgcgccgcgttcaaatactgcagcatcgaccacagcgtcagcaccgccgccacgaggaaaagcgcgatcccggcccactccacccacggataaggacgccacagcatccataccagggcggtcatctgggcggtcgttttcactttgccaatccatgagaccgccacgctgctgcgtttccccagctccgccatccactcacgcagcgcggagataatgatctcacgggcaatcatggtcgccgccggtagcgtgacccaccaggtgtgatagtgttcggcaaccagcaccatggcgatagccaccatgactttatcggcaaccgggtcgaggaaggcgccaaaacgggtgctctgattccagcgacgagcgaggaaaccatcaaaccagtcggttaccgcggcaacaaagaagatcagcgcgcaggcaaacggcgcccagctaaagggcagataaaacgccagcacaaaaaacgggatcaggatgacgcgaaacagagtaagcaacgtagggatattaaattgcatagtgacgggtaactatctgttgtaagtaaaaattagccctatgttgctacagagcccctaatgtttcaacgagtagaagatcttttctgccagagcgtgagagatgcccggtactttagcaatttcttcgacgctggcctgctgtagcccctgcagcccacccatatacttcagcagcatctgacgacgcttcggccccaccccctcgatagtctcaagcgagctggtgctcttcactttcgcccgttttttgcgatgcccggagatcgcatgatcgtgcgattcatcgcgaatatgctggatcacatgcagggccggcgaatccggcggcaggctaaacccttccccttccggctcaaagaataacgtttccagacccgcttttcgatcgctacctttcgccacgcccagcagcagcggatgatgtttatcccaggggacgtccagttcagcaaacacggctttcgcctgggccagctgtcccttgccgccgtctatcaggatcacatccgggatcttgttgtcatcaatcgctttaccatagcgacggcgcaggacctgattcatcgccgcatagtcatcgccaggggtaatgccggtgatgttgtagcgccgatactccgcgcgcagtgggccattgctatcaaacaccacacaggatgctacggtctgttcgcccatggtgtggctgatgtcaaaacactccattcgcttgacggccggcagctccagtacgctggccagcgcctgcaaacgctgatgaatggtcgattgctgagacaatttggtcgttaacgctgtcgcggcgttggtccgcgccagcttaagataacgcgctctgtcgccgcgcggcttagtctgcacattgattcgacgacccgccagctccgacagcgagtcggccagcagcgtcttatccccaaggttaaagtcgagcaaaatctcccccggcagcgtgcgcatttggctgccctgcaggtagaactggccgacaaaggtctccacgacctctcccagctcggtgccgcccggcactttcgggaagtagcttcggctgcccagcactttgccctgacggataaacagcacatgcacgcaggccatgccggcatcgaaggcgacgccgatcacgtcgaggtcgtcaccggtgttggagacaaactgtttctccgtcacgcggcggacggcctgaatctggtcgcggatgcgcgcggcctcttcgaactccaggttctggctcgccttctccatccgcgcgatgagctgggtcagcacctggtcatccttgccggcgagaaacagccgcacatactctacctgctgagcatactcttcttcgctgaccagcccggccacgcacggccccaggcagcgaccaatctgatactgcagacaggggcgggagcgattgcggtagacgctgttttcacactgacggatgggaaagattttctgcagcagcgccagggtctcgcgcacggcatagccgttgggaaaaggaccaaaatattcgcccttcgcatgtttggcgccgcgatgcatcgccagacgcggatgagtatcgccgctgagaaaaataaaaggatacgatttatcgtcgcgtaacagcacgttgtaacgtggctggtacagcttaatatagttgtgctcaagcagcagcgcttccgtctcggtgtgggtgacggtcacgtcgatttgcgcgatcagcgctaccagcgcttccgttttacgcgacgcaaggttgctgcggaagtagctactgagccgctttttcagatctttggctttgccaacatagatgacggttccgccagcatcatacatccgatacacaccgggctggctggtcaccgttttcaggaaagcttttgcgtcaaaaacatcactcactggcttgctaacgactccgcattacacaggccatggcgaattgccaggtgggtcagctcgacatcgccatgaatgtttaatttactgaacatccgatagcggtagctgttaaccgttttaggactcagatttagctgctctgagatctcattcaccttctgacctttggtgatcatcagcataatctgcaattcgcgttcagacaaactggcaaacggcgattctgtcttttcgggttcaatctgacttaacgccatttgctgggcaatatcggaggcaatatagcgctgcccggacgcgacgcagcggatggcattcaccacttcctgcggcgcggcgcctttactgagatagcctgccgcgcccgcctgcatgaccttggcaggtaaaggattctcggtatgcacggtcaacatgatcactttggtgcccgccacggagcgcgcgattttgcgcgtcgcttcaagaccaccgatcccaggcatgttcatgtccatcaggacgacatctgcggaattagcccggcaccacttgacggcgtcctcgccgcagcaggcttcgccagcgactttaatcccttttatatcttccagaatgcgtcgtatccctgcgcgcaccagttcgtggtcatcaacaagaagaacgttgatcaaaggaataatctccagaatgagggataacgctactgatactttatctcccacatattaccgggttttattgctattttaaaaggcaaaaaaatgccctcgcctcgatttggctctcatttatggcaatgtctgtgcacactaagtggaaagtcattgagaacagtcagttgcccggctcttattttttaacaatactcatacagaaggcacaaaaaacacaacagattacgtagcgcataaatacgaagcaaaatatgtaacaattattaacgagctaaatagatgggggaaattattggcttgccgacggctattacgtattatccgaagcatcaaaacattcacagctcagatgagagaacagaaattaagcacaccttttttttctgtcgcttgtggtatactgcgcggccttcacattgactagagcgcaatagcgcagcgagtaaacgaggatatcgatgagcacaccagatttttccactgcagaaaataagcaggaactggcgcaggaagtctcctgcctgaaagcgatgattacgctgatgctgcaggcgatgggccaggcggatgcggggcgcgtgattattaaaatggaaaagcagatttcacagatggaagatgaggctcaggccgccgtattctccagcaccgttaagcagattaaacaagcctatcggcagtaatcctgtgccggctgaaagtatcactgacagccggtatcacgtctgacacgcagaacggcaggcgcattcagattagcccagtcgccacggcgtagcaggcaatttgcgttttattcggcgcattaaatttccgctgcatattcttctgatggaaattcaccgtattttccgaaatcgagagaatcatcgccacctccgccgaagtctttccttccgccgtccatttgaggatttccagttcgcggcggctgaacttcatctccggcggcatcaccatctcatcttccagacgcagcagcgtcagcaagcttagttcagtcagcgttcgcagacgcagctcaagctcatcttcagggtaaccgcccggcagacgattgttcgcggagacagagagaaatccctgagcatggtttggcaacgtcaggcactgcgtcacgcccttttgcagaccatggtcacgcgccccgtcccacagtgccggcgcatcacgaaacaggctgtcgttccatggcagatggccacgcataaaattctccggccgtaacacaggatctatcgcgaaataattttctgcctgatagtgcgacatccatgcgcgggggtaagtcgactggaacgtaacgcgggggcgggtgaaaggcaccgggtggcgcacacaaagcgtgtagtaatcatattccagcgcttcggtttcacgttgcaggagattataaacctcctcgccggtggccatggactgaaattggtgcagcatatcccgccgccagctgaaaaaatcattgtccctcatagctgtgcaaataactcctgattgataatcattattataaatacagaaaactaacacataaatcttatttatatgtataaaatatcgtagctgtcgcatttattagtctgaaggcttgccattttcccgctcgccgcacagaaacatagcgtttttctcccatcatgttctacaccctgccaagggcgatgggaagcggtgtatacggccgtgggagtcaatagcgcaaagacgtgtcgcgggggcgttaccccgccgcgagagtgggctaaacgcggcggctcccgcgaagctgagccgccgcgccagcccatgctttactgcatcaggaatttttcaaggaactgacgggtacgcggctgctggggcgaagcgaacaacgcttttgcctcgccttgttcgacaatgcgtccctgatccataaatatcgcccgatcggcaacgtcgcgggcgaaactcatttcatgggtcacgatcaccatggtgcgtttttcctgcgccagctgacggatggtgttgagcacctcccccaccagctcaggatcgagagccgaggtgggttcatcaaacaggatcacgtccggacgcatagccagcgcgcgggcaatagccactcgctgctgctgcccgccggagagacggcgcggatagctattctcttttccgctgagccccaccttcgccagcagttcgcgcgcccgcgccatggactcctgcttatcttcaccttttacgatgaccggcccttcaataatgttctccagcaccgtacggtggggaaacagattaaagttctggaagacaaagccgacgtgctggcgcagctggcgaatgagccctttctgcggcccgaggctgcgaccggcgtcgatcgtcacatcgccgacgcggatagtgccgctctccggttgctccagcaggttgatgctacgcagcagggtggttttgcccgagccgctggggccgatgatcgccaccacttcccctttctgtacctccaggtcgataccatggagcaccgtctggccatggaatttttttaccaggcttttcacttctatcgcactcatttcggatcacgctcctggcggttcagctggttttcaaaataattctgcagcgaggagagcactgtcgccattacccagtagatcagggaggccgccagatacatggtgaagacctccagggttcgcgaggtgattagctgcgcctgacgaaacagctccggcacctggatcgttgccgccagcgaggtatcttttaccaggctgataaaactgttcgacagcggcggcaaagcgacccgcgccgcctggggtaaaatggcccgacgcatcgtctgccagggcgtcataccgatactggccgccgcttcccattgccctttatcaatcgaggcgatggccgcgcgcagcgtttccgccgcataggccgcagtattcaacgacaggccgatcatcgccgccgggatcgggtcaagctcaatgccgaactgcggcaagccgtagtagatcataaacagctgggcgataagcggcgtgccgcggaaaatggagatatacatgcgcgccagccattttaccggccagactggcgacatgcgcatcagcgccaggataaagcccagcaccaggccgaaaaacatcccgccaatgctcagctgcagcgtaaagacggcccctttcagcagaaaaggggcggaatcaatgaccagttggatactttcttgcatgctgtcgtttctgtattagaggtgaggatgataggcaaacagcgccggcgctccgccggtgtggacgaacagtatcggcccttcatccttaaagcgcttctgcgtgatgccgtcgataagcccggccatcgctttgccggtatagaccgggtcgagcaaaataccttccagctgcgccagcagcttcacggcggccatcccatcttcgtttggcgtaccgtatcctggggcaaagtagtcatcccacagtataatttcagccttcgactgtagctcgagactgttggccacggcctgctgcagcgcctccactttcggcaactggtcagcgaccgagcgcgacacggtcaccccaatcagttccgcctgcggcatcagctgttcaaggccgaccgccaatccggcatgggtgccggcgctgccggaggcgaccacgactgacgagatcgccaccgcgtcttcgcactgctggctgatttccagtgcgctttccacatagcctaacgcgccgagggcattggagccgccgaccggaataacatacggacgatacccctgcgcctcaatgcgggtcgccagctcatcgagctgggcggagggatcggtcagggcatcacacatctcaacctgggtgttaaagagatccagcagcagacggttgccattgctcagatagttctccgcccgggtgccgatgggattttccagtagcgccacgcaatgcagtcccagtttcgcagcgactgccgccgtctgacgcacatggttagactggatcgcgccggcggtgattaaggtatccgcgccctcgcgcagcgcatcggcggcgagaaactccagcttacgcagtttgttgccccccatcgccagcggcgtcgtatcatcacgtttaataaaaatttcgcgcccaaggtgatcggacagacgcgggagatactccagcggcgtcggcgcgccgatcaattccaggcgcggaaagcgggttaagttttgcagtgacatggcccctcctgactcagttatgcttcattatgcacacagttacgcgctaaataaaaaaaggcgcttccaggagcgccttttttcaccgctgtccgttatttcgtcacgtcagcgccaaaccatttctcggacagcgccttcaggctgccatctttctgcatgtctgcaatcgcgccatctaccgttttcagcaggtcgtcgttgcctttacgcagcgcaacgccagcttcctgacgagagaaggcttcgccggttaccgccagcgtattgttggttttcttcaccagatccaacgccgccagacggtctaccagaatggcgtcaatacggcctacacgcagatcctggtatttggtgggatcgtcatcataggtacggacgtccacgccctggacattctgacgcagccactcttcatagttagtgcccagtccgacgcccactttcttgcctttcagatccgccgcggttttaatcacgccttcgttacccttcttcaccagcgcctgcacgccggagacggtatatggggtggagaaatcgtatttcttcttacgttcgtcagagatagtgacctggttaatcaccacgtcgatacgcttggagtccagcgaggccagcataccgtcccacttggtcggtttgagatcggccttcacgccaagatgtttcgccagttcgttagcgaattccacttcaaacccggtcagcttgccgtcatccccctggaaactaaagggagggtaggtgccttcgaggcccacgcgtagggtgccgcgctctttaatctgattgagcaggttttccgccgcaaaagttctcacgctgacgccagccatcaaaacaacggccatcgcgcccatcatcgcctgacgacccagaagtgctaatttcatagataccccgaaggttaggattttcctgtagtgtaaggcgcttaacgccctgacaccaacatcgttacgctacatcttatgcaaatttattatatatgatccgctttagggtatagcgaaaatcagggctttcctcaccctttttgctggatatctcccatactgcaaaggtcagcctgttgacgtctggagcatggaagatgaaaaaccccaccttattgcaatgttttcactggtactaccccaccggcggcgagctgtggcctgaggtcgaagcgctggcgcccagcctgaatgaaatcggcatcaatatggtctggttgccacccgcctacaaaggcgcctcgggcggttactccgtcggctatgatacctacgatctctttgacctcggcgagtttgatcaaaaagggtctgtcgccacaaaatatggcgacaaagcgcagttgctggcggcgatcaacgccctgaaggagcacaatatcgccgtgctgctggatgtagtggtaaaccataaaatgggcgctgatgaaaaagaggctctgcgcgttcagcgcgtcgatgagcaggatcgtacgcaaattgacgaggagatcattgagtgcgaggcatggacgcgctacaccttcccggtgcgcgccggacagtattcgcagtttgtctgggactacaaatgttttagcggcattgaccacatcgagaacccgacggaagacggtgtgtttaaaatcgtcaacgattacaccggcgaaggctggaatgaacaggtcgatgatgagctcggcaactttgactatctgatgggcgccaatatcgatttccgcaatcatgcagtgaccgaggagatcaaatactgggcgcgctgggtaatggagcagaccggctgcgacggttttcgtcttgacgcggtcaagcatatccccgcctggttttataaagcgtggatcgagcatgttcaggaggtggccccgcagccgctgtttattgtagcggaatactggtcccatgaagtggagaagctccagcagtatatcgacctggtcgagggcaaaacgatgctgtttgatgccccactgcagatgaaatttcatgaagcgtcgcgccagggccgcgattatgacatgagccagattttcagcgggacgctggtcgaagccgaccctttccatgccgtcactctggtcaccaatcatgatacgcagccgctgcaggcccttgaggcgccggttgaaccctggttcaagcccctcgcctatgcgctgatcctgctgcgggagaatggcgtgccctcggtcttttatgccgatctcttcggcgcttcctatgaggataccggcggcgacggagagacctatgccattgagatgcccgttatcgaacaactccacgagctgatcgacgcccgtcagcgttttgcccatggcgtgcaaaccctttggttcgatcatcctaactgcatcgcctttagtcgtagcggtactgacgacgatccaggctgcgtggtgatcatgtccaatggcgatgagggcgaaaaggcgctgacgctgggcgaaaactatggcaacaaacgctggcgggattttctcggtaaccgggaagagattgtcgaaaccgatggcgaaggctgcgcgacctttacatgtaacggggggagcgtgagcgtgtgggtgttagaggaggtattgtagtcctctgacgtcgggcgggccagctatggcccgccaaaatctcagcgcgtggaggccggcgcgctgacgggccccgtcgctcgcgctttggcccacgccttctcgcactccggagtgagacgttcaacacgggacaacgtcatccgatcgtaggagatcgtgttgccctcgcgctcgacaggatagatgtccagggaagcggtcacgttgtagatctcactgtcacgattcatcagtttccccggctgcgcaatcacgcgctgccactggcggcagtcgaaggtgtccccttctttggtgacaatcaggctggcaatggcgtcaggactcatcatcgcgctctgcggccctttcgtttgccagaaacctgcaaggccagccggcgccggcgctttaacgacgtcctcataacgatcaacctgtacgcaaccggccagcgccaccaccatgccagcaaaaaataactttttcatcattcatcccacaagccgataaaaaagtattgtggcattaaagcgttaagccttccacccccaccgcaaagggataagcgagcaagccagcaaccgctaacgtgggtttcatttgaagtaaggaaattctgaaagtaaaagaatactgggcgcgtaaccatagcatctatgggcactttttgtttttaattcggtcacactaccggttcttgactttactttaagagttttcctggcaaattatatgcatagatgcggaatagtttaatggagctaatgggttctttctaaacctactattattatcgcccgcaaggactgcttcgcacagccagtgcgaagtgtatatcgttacgtgttgattgaggatgggtcatgtcaacgatgattatggatttgtgcagctatacccggttgggattgacgggatatctgaccagtcggggaattaaaaaacaggaaatcgttgaggtcaacagtgctgcggatctgcagaaacactgtacgtcgtgttgcccggcggtggtgtttctgaatgaagactgtttcgtgcatgatgatgaaagtaatggcattattcgccagatcattacgcaaaacccggcgacgctgtttgttatctttatgtcgctggcgaacatccattttgaccgctatttgcgggtacggaagaatctgctaatcagttcaaaatcgataaccccaaaagaccttgatgttattctggttaattatcttaaatacaaaaacaccagtgtagggcagttaactttaccgacattgtcactgagtaaaacagaatcaaatatgctgcaaatgtggatggccgggcatggtacttcgcaaatctcaacgcaaatgaacatcaaagcgaagacggtatcgtcgcataaaggcaatattaaaaagaaaatacaaacgcataataagcaggtgatttatcatatcgttcggctgaccgaaaacatcacctccggtattcaggtaaatatgcgctgaaacaaactggcggcgctcccgccagttcagttttacgagacctctttttccacgaaaatcccatccgggtggcctatttcattaaaaaaccagatccccagaggatagtcttccagtgaaaccagatacatcgttccttcactaaacgactcaatcgccagcactacccccgatcgacgtgggccaccgtcggtcttcaccgtgacacgatcgttcacctgcataatcatctcctctatattttcagccagtgtagaacaaaaccacgcaactcgcagcgtcgcggcacgtgactggcgcttttttagaccgactatacttagagaggcttgagcaacgctcagcgaggggggtaatgatgaagcaccaattaacaggccagaccggggacgaccttgacgtcaacgtagatgccctgctggcggcaattaatgagatcagcgaaagcgaagtccatcgcatgctggacgacccgcagcgcgccagcatcgatggccgcgggtcacatacctggcgtgagctggcggaggcattcgaactcgatattcacgatttcagcgccagtgaagccaaccgttagcggcaggcgaaaaaaatcccgactcgcaggagtcgggatcaaacttgctaatgcaagaagcacttgaaaattcgttacaccgggaaatccgatgcgttgaaacattatcctcaattattttgcatgacaagagatattcatgacgcaaaatattgagaatgttggcgcttgatgacttatcgggctgcaaggctgatgtgagaaggcttagccgcaaaccggtttcattcgatagcgcgatcgcctgcgatcactttaagataattctcattttgccaatcggcatcgaaacgttttactcacgctgcgctgcgaaaacagacctggttacgcccattttgcttggccagatagagtcgcccatcggccaccgactgcagcgcttcaaactgatactccccccactcttcgctggcgctcacccctaacgaggcgctaacccgcagcgtcacgttgttatgcaaaaagacttcccgtccctggatacgctggcgcaatcgctccgccaccgccgccgcttcctgcagggtggtattcggcatcacgatacaaaactcttctccgcccactctgcccagcagatcgccctgccgaaccgcgctggacagcgtactggccaccatcgacagcaccctgtcccccgcctgatgaccatagcgatcgttgatgtgcttaaaatgatccagatcgagctggatcaccgccagcggccgtccgctgcgctggcagtcgctggctaccgccatcgcctgttcaaacagagccccgcgattgagcaggcgagtcaaggcatcgtgccatgcctgccactccagagaggtttgcagaacgctcatgttgcggaccatgcggcggatcactagccaggagagcaacagcatcaaggtgaagaggacccacatcagggtcagggcgatggtgatggtgccaaagttcccgcggacgccttcccgcagagtgtggatccgcagcagcacgccgtcaaaattgcgcagtttggcccagctgatatagcgcgtcagcagacgcagccctccctggttatcatggacaaacgcgcggctcagcagctcctgctcgcgcggcgacagcagggtcaggacattccccggcgcggaagaagccagcaggttcaaatggctatcataaagttggtactctccctcttgtcccccctgcatggcgctaaccaaaaacgctttgatttcactgactgagaaatccatcgccagcacgccgcgccagtaaccggcaaaatccaacggtatcgaagcggtgaccacctgctcttccagctgcgggtcatcgtcaggaaaggtttgccagataacgcctcgccccggattatttcgttgggtctggcgggtaaaccacggagcgctgagggcttgggaatagtgcgttatcacctgcgactcatcccgcagcggcagggtcgaggtaaaaaagccgctacgagagatatactgcatccgctcggcgaaatcgcgatcgtgctgcgtcagatttagcagatagcccagctcgagcgtcgccattagttcatcagccgccagcggatcgtccaccagcaggatagggttgtcgccagcgacgctgcccgagatgccaaacaccggcagcgtacgccgattcggtagcgccacccgccaggcctgctgatggcgctggctcagatagcgttggctggccttacgcaatacatcgatatcgagcggctgttcgagcgccgcctgcatcccatggcgaaaaaacatcattctgtcgatgttgaactgcaacagcccatccatttcttgagcgacgttagccagattgttacgctggttggccacgtaggcctcttccaggacattgatttcacgccagatcagcagcgtggagaaaaacagcactgcgataaaacaagcgttaaccacatgcgccgggcgagccaggtggtagcacttttttaacttcaaccgcagtggcttatccatctttctctcgcagtacgttgcgcaaacctcgcggcgtcagcgccccggtctctgtcgatacccggggcgttttcagggtagaacacgcggcgccgttacgctgcgtttcgccatgctactttccagcgccacgcaggctgctcaccgccttaacgcccgccagcaccaccgcgccgatgataaaacccagcaccaggttggcgacgaccggcagcgtggaggccatcaccccacccaaccccgcgctccagtgctcgatggcatgatgcagcggcgcaataccgtgaacgactatccccccgccgacgaggaacatggccagcgtcccgacgatggacaacaccttcatcaggcggggagcgacggccaggagccctttacccagccactgcgccagcgcactacgtttttccgccagccagtaacccatgtcgtccagcttgacgatcacccccaccaggccatacaccccgatagtgaccagaatcgcaatccccgaaagaataaggatttggttaagcagcggagcttccgccacgatgccgagggtaatggcgacaatttccgcggacaaaataaaatcggtgcgaatcgcgccttttactttgtcacgctcaaaggccagcggatcgcgctccgccagcgcggcgagacgctgctgccgccgttcaggatcctctttgtgtttccgcgcttccagactgtgcagtaccttctccaccccttcgaaacagagaaacgcgccgcccagcatcaacaatggcgtaatcgcccaggggatgaaggcgctgatcaacaaagccagtggcacgaggatcactttgttaacgaacgaccctttcgccactccccagaccacgggcaactcgcgattcgcccgcacgccggtaacctgttgggcattgagagacaaatcgtcgcccagcacccccgccgtttttttcgccgctaccttgcccatcacggaaatatcgtccagcagcgtggcgatatcatcaagtaatgttaaaagactacttcctgccaaaatgattttccttctcttttcatcaatgtctccctcgagtatgcgttaaaaaacggccggtgcccaaggtacaattagtcaatataaatttaacaacctgacgcaaattaaccactcgccagcacgatagttttcacgtttactatatgtcccctttctatctctgcaccgtcgtgaggaagtatgtctacccgtcagcttttaccgctcatcggggcgctgtttgcgctgtatatcatctggggctctacctatttcgctatcgccgtcggggtcgccagctggccgccgctaatgatggccggcattcgttttctcgctgccggcgtgctgttgctggggtggctactggccaccggccataagctaccggcgcgtcgtccgctgcttaacgctgcgctgatcggcgtgttgctgcttgcggttggcaacggcttcgtgacgctggctgaacatcagcacgtcccctccggcatcgcggcggtgatggtcgccaccgtaccgctgttcaccttatgcttcagccgctttttcggcatcgccacccgtaaactggagtggctgggcattgccattggccttgcgggtatcgtgatgctcaacagcggaggcaacctgaacggcaacccctggggcgcactgctgatcctgattggttccctaagctgggccttcggctcggtttacggttcgcgaatcgtattgccgaccggcatgatggcgggggcaatcgagatgctcgccgccgggatcgtcctgctggcggcctcatggctgagcggtgaaaccttaacccgcgtcccttcctggtccgggatcgccgccctggcctatctggccatctttggctcgctgatcgccattaacgcctacatgtttttaatccgcaatgtcaccccggcggtcgccaccagctacgcctatgttaatccggtggtcgcggtgctcctcggtactgggttcggcggcgagagcctgtcgctcattgagtggctggcgctggcggtgattattttcgccgtagtgctggtgacgctggggaaatatctcttccccgtccgcagcgaggctactccttgtaaggcgtcgaagtagtcgtcagttcgcggatcccctgcgtatcgatctgcgcgtcgtgtccggcgccgcagatccactcttccagacgttgggtgagcgccgcatcactcagcctgaggcgcccgcgcagggcgcattcccagatgattaatacccgccagccctcttcggccagcttttgccggtcgcgggcgtcgcgcgccacgttaccggcgattttgtccagccagaatgccgtgcgggtggccggcaccttaaacagataacagtcatggtgatgccagaaacagccgtgagtaaagataacgcagcggtagtcgggtaaggcgaaatcggggcgtcccggcagcgcgcgatcctgggcgacaaaggtgaatcccgccccggtcagcagcgccgctatccgcttttcgatcgccgtatcgcgcgtggcgatcgcccgcatatttttactgcgcgtcgctttatcgtgaacatccgccatcattatcatccgcttcgcggcgcgccaccgcctgagcgatgcgcggcgccaggagtttcgccaccgcggcgaagaccggaaccaccaccgagttgccaaactgacgataggcctgcgtatccgataccgggatgcgaaaacgcgccccctgcggggattcaaagcccatcagccgggcgcattcgcgcggcgtcaaccggcgaggccgccgctgttgattcagcggatcgtcaaaatgcttctcaccgagcggccggtcccagccgcgatcgacgagaatttcggcaccatctttatagtagcgggcagaaagcgtccgggccacgctgtggggattggcggggtcaaccaggccataaccaaagccattgccccgcgcctgatgcttgcgggcataacgataaagatatttccacagcaccggcgtaagaataaatttcgcatcgaccgtcggctccagcagctcgccaaatgttggccgcactgccgggtactgcgccgcgatgtcgcgcagcgtaaatccagcatgcagctgcagatcgcgacggaaacccaccagcacgatgcgctcccggtgctgaggcaagaaatggcgcccgtcaatcaccttcgggtcatccggcccggtatgccccgcgtcagctacttcatatcccagctcatccagcgtctgcatgatgatacggaaggtgcgcccctgatcgtggcttttgaggtttttgacattctccagcacaaaaatcgctggctgacgagccgcgataattctcaccacgtcaaaaaacagcgttccctgggtttcgcaggcaaagccatgcgcacggcccatcgcatttttcttagagacgccggcaagcgagaaaggctggcaggggaagccagccagcagcacatcatgctgagggatagattcacgaatatgccgcgccgcctcctcgtcgctaacgtcagagcgttggctgagggtaatatcgcggatatcttcattaaaacggtgctgctgcggatcacagtaccagttggccttataggtgcgtaccgcgtgcttgttccactcgctggtgaaaacgcactgcccgccgatggcttcaaaaccactgcggatcccgccaataccggcaaacagatcgataaaacggaacccatagtgcggatgatgggccggcggcgaaggcaggagcgtcgccagatgagcaacttcctgcgggcgcaaacgctccgccacgcggccaagcgccaccacgcgcttgaggatcgccgcgctccagtgctgttcgccgacgctcaccagttcggcaaccagcgtttttacatcgtagatcgtcatcagctgacgcagcagcgcctcagcgtcttccccggcctgttcagccaacgacaacgacctgtgttccttgcttaacttttgcggcatatcctcaaccaacgcggacgattttggcagagagtaccataaatcaccggtcggttgacgcctgcggtgcaaagcggcgcaaaaccgcttcatccagcgccagcggctccccctgcagctccgcgctgagcttagccataaattcgacgagaaaacgggcattatgctgcgccatcgctttccccttgtcagtttgcatggtttccggcaggcgcagaagtttgcactggaaatggtcgagggcatatttgcggtcatccagcgcccgccgatcagcaaaaggatcttcggcatcaaacaagatggtattcagagcgccggcgacagcgaagaccctcgccagaccaatggctcccagcgactcgagtcgatcggcatcctgaactattttcgcctccagcgtgcgcggtgggatcgccgcgctgaagctgtgcgcctcgatggcatggctgaccgccgggtaacgatccgcaggaaaatcagcaaaggccgactgcagaatggcgagggttttctcggcggccatcatcgaggatcgacttcgctccggatgattttttggcaagctgacgatgtcatgaaaatagcaggccgtgaggagtaccagccggtcgacttcctcccccgcggccagctgagtggcggtcgcccagacgcgacgaaaatgggacagatcgtgtgcggcgtcatcctgcgcatggtgcgtcagtatccagcgctcaaatcgttgctgccagtcaaccaggtccataggctttcctttatctgagggtcagcctcgagcatagcaattttagcgctgatgatcctgctcgccgcgggatggacgcgtataccagacgaccgcgccgagaatagagccaatgccgccgaggaccagcatacccaacagggcgccaagccatttcccggccgttgttccaaaatcaccctccacgctggcgccgggaacgctgtgaatttttcccactacccaccagtaacgcacaatgacccagacacaatatccgcaaaaagcatacaacgcccagagcgcaagtttccctcccgggctgcgttttgcctgctcttccatctcattcctctccgtgacacaacagactattgtcactcaaaacgtgacacgcatcacattataccgctaacctgcgtcacaggcagcagttacatcttcgtcttctgcgccttctcgcgacttatgctgccaatgcgcacaggctgaagagatgtccttattatctcccgtacgcttaaagctattcattccttaattatcgcaagctgggttgataattccctggatatttacattcacacaaaataaatttccataatgaataatgtgcttgattgttatttgttcattttatttcataaaattaacaacaaccaaccaaagatacaataacccattgctatataagaannnnnnnnnnnnnnnnnnnnnnnnnnnnnnnnnnnnnnnnnnnnnnnnnnnnnnnnnnnnnnnnnnnnnnnnnnnnnnnnnnnnnnnnnnnnnnnnnnnnnnnnnnnnnnnnnnnnnnnnnnnnnnnnnnnnnnnnnnnnnnnnnnnnnnnnnnnnnnnnnnnnnnnnnnnnnnnnnggaatatataatgaaaagaaaagtactggcactcatggttccggcattattaatggctagcgccgctaatgccgccgaaatctataacaaaaacggtaataaactggacctctacgggaaagttgacggcctgcattacttctctgacgacgcttcagaggacggcgaccagacctatgttcgctttggtctgaaaggcgaaacgcagattacttccgagttaaccggctacggtcagtgggaatacaacattcaggcgaacaccagcgaaaaagaaggcgcgaactcctggacccgtctcggctttgccggcctgaagtttgccgactgcgggtcgctggactatggccggaactacggcgtggtctacgacattgaatcctggaccgatatgctgccggaattcggcggcgatacctacacccagaccgacgtttacatgaccggccgtactaacggcgtggccacctaccgtaacagcgatttcttcggcctcgtcgacggcctgcatttcgccctgcagtatcagggtaataatgaaaacgccggttctggcgaaggcactaataacggtgggaaacgtaagctggcgcgggaaaatggcgacggttttggtatctccagctactatgatctcgatatgggcatcagcttcggggcagcgtattcgtcttctgaccgtacccataaccagctggcggccgcgcgtagcagccagcgttatgccaacggcgataaagccgatgcctggaccgtcggcgcgaaatatgacgccaataacatctatctggccgccatgtatgctgagacccgcaacatgaccttctatggcaacgatagttttggcggaattgccaacaaaacgcagaacttcgaagtggtcgcgcagtatcagttcgacgactttaatttaccgctgcgtccgtccgtggcctatctgcagtcgaagggtaaagatctctacgcctattctcgctacggcgacaaggatctggtcaagtatgtcgacgtgggcatgacctactacttcaacaaaaatatgtccacctatgtggattataaaatcaacctgctggatgaagacgaccgcttctacaaaaacagcggtatcgcgaccgatgatatcgtcgccctcggcctggtctatcagttctgatccccgtcaaagcccgcgttcagcgggcttttttatgttcccgctccgttgagatcactcttttcgacattgccgctttccaggcgtaccttccctctttatgatgcgtttaagctcgttcgggctaaaagcggcgataaggtgccaaaaggataaagcgcgctaccgcgactctacgctgaaaccaggacgatgatgatggtgataccccagcgcaggcgttatacctgaagctaacggtgttattgaagggaaggttagagcaagaaaagtggcggagagagggggatttgaacccccggtagagttgcccctactccggttttcgagaccggtccgttcagccgctccggcatctctccgctgtgatggttgctataatgccaggatctttggcattttaatagctcccgtttcggtaattgtgttcaagtgacgactttgcgagcaatatgatgtttaaatggccctggaaagcagatgatgagtccggcaacgcagagatgccctgggagcaagcgcttgccattccggttttagcccatctttcgtccactgagcagcacaagctcacgcagatggctgcccgttttttacagcaaaagcggctggtggcattgcaggggctggagctgaccccgctgcatcaggcgcgcattgctatgctcttttgtctgccggtgcttgagctgggcattgagtggctggatggctttcatgaagtgctgatctaccctgcccctttcatcgtcgatgatgaatgggaggatgatattggtctggtccacaaccagcgggtggtacagtcgggacaaagctggcaacagggtcctgtagtgctgaactggctggatattcaagactcttttgatgcgtcaggctttaaccttgtggtgcatgaagtggcgcataagcttgatacgcggaacggcgaccgggccagcggcgtgccgcttatcccgttgcgtgaagttgccggctgggagcacgatctccacgccgcgatgaacaacattcaggatgagatagatctggtcggcgaaagcgccgccagtattgacgcctatgccgccaccgatcccgcagagtgctttgctgtcctctcggaatattttttcagtgcgcctgaactgttcgcgcctcgcttcccggccctgtggcagcgtttttgccacttttaccgccaggatccgctggcgcgtagacgtgagaatggcctgcaggacgaaggcgatcggcgcattgttcactaaaacaacgtgttgagctaaatttagccatttgaatcagcaggttaattttagtgttgacacaaaaatgcgaggccagtagtatgcgcctcgttcacacgattcctctgtagttcagtcggtagaacggcggactgttaatccgtatgtcactggttcgagtccagtcagaggagccaaatttaaaaatcccgctcagggaaacctgagcgggatttttgctttccgtgatcctctccgctccccaagcatgcaatcttatcctggtgtaggtgctattttcttgctatgaggcaagctgaacggccgtgagccccacgctcccgcaaaggcttaaataaaggcggtttaaccgtgccggaccatacctgggtgtaaggcaatcatgcgcggttccaaaaaagatcggcaacaccgccgcttctgacatctctccgccagcgggtataagcagcatcgtaccgtaggtaccgtccaaggttccgtatgtgatccccgcaggtgaaaagcagcgatgctgctcccaaccttatggctacagactttcgatccggcggtaaccgctgggtctgccgctgcgtagcagacgatcccgatccggcagttacctttacagacagcgcgggctgcccaaatgcattttccactggcggaaagacccgtaacgcttagggtagcctggcaataaccttaatctcgaacttaaatccataaagccacgtcacgccgatcccggtcagcgtagggtaaggcgcttctccccaatattctggcaggatactccagatagcgtcgagatttgactcaggatcgacgacaaagagggtaacatcaaccacgtcctcaaacgtgcagcccgccgctgcgagcacagcattaagatttttgaacgccagcctgacctgtgctttcagatcgtgctcaggcgaaccatcctcgtggctacccacctgcccagaaacaaacaagaaaccattggatttgatggccggtgaataacgattgcgctcatagagcgcctgacgaccgaagggaaaaacggcttcgcgtgctgtcatgtttgtacctttatgctggggcgaaatcagcccggtgaatgtaaagacactgtacaacgacgagatcgggcggataaacaagcgactttgtccctcattgtttgtaatatccaaacaatcgatgaaagacaggataagaaatggatcgtttcgatgcaatgcgcgcctttgctcgggtggtagaggcagggagcttcacgaaggctgcccaaacgcttcatatgagcaaaactacggtgacgcaactcattcagcagctggaatcgcgcctgcgcgtcagattgctccatcgcaccacccgcaagctcggtgtgactcccgatggcgcggtctactacgaacgcgtcattcgtctgctggcggacatggaggatgctgaaaacagcctgtccagtgcggcgatgacgcccaggggacggctacgggtggatgtaccgagtccgctggcccgtcttattctggtgccggcgctaccggctttccacgcccgctaccctgatatccagatcgacatgggtgtgagcgaccgggaagtggatctgatcggcgacaacgtggattgcgttctgcgcggtggtcaaatcaccgaccagtccctaatcgcacgccatgtcggcgatttgcaaatcggcgtctacgtcgcccccagctatgtggaacgccttggcgctcccgcacacccgcgcgagctgcaaaatactgaccattgcatagtgggattcttgtcctcgcgcaccagtaagattgatcctttggtactgtgcagtgagaatgaacgtattgaaatcacgggcaactacgtacttgccgtggatgatggcaatgcttacctcgaagctgggttagttggcttaggcgtgattgcgctgcccaactatatggcggcagcgcatcaggccgttggcgctttgattccattatttacacaatggcggattagcccaatgcctctgtacctggcgtttccaccgaaccgccatgtcaacgccaagctgcgcgtttttattgactggatcgttgaattgatgcagcagcatgtccccattaccaacaataagtaacgacatcccagctccctgattcgcttatcaacgacgatggggttcagcggtagtgactgtggtcaggcgtgttttgacaatagggattcagcagaactcatccgtcttatattctggataatggctatcataaaggggatcttcgctttcatggacaatggcagccaaaaaaaagatcctcagtaacaatattaagtccatagatatatttgcagactttatcatcccctcctgagcatctcctggcgccctcattaaaacgccatcaccgccactgctgataagttaaggatcggtttcccgatccttattcccaacaacgttgaatgcatcgacagcaaaagagccttcttacaatagccgttaatcagactaaacgacccgctacaaacttccctgcgccgctgtggcgctgatattcaccggcatgccggagcggcgctgcagggtctgctcgacctgggcagggctcactcccggcccctgggtaaagtcgcgcagcgccgaggtcatcggcaaggggacttttctgtcggattcaaactccgcgcggttgcgcgacagcggctcgtgcacctccagccagtgactgccgtccggctccacgctgtacttcaccggctgatcgatcagctgaacccgcgtcccaaccggcacgttatcaaacaggaatttaatatcgtcattgcgcaggcggatgcatccctggctgacgcgcagcccgataccaaagttggcattggtgccgtggatggcgtagagcctgccgatgtagatcgcatacagccccatcggattatcgggcccggggggcaccagcgccggcagggttttgccctctttcgcatactcgcggcgggtattggcggttggcacccaggtggggccttcctgcttacgctctactgccgtcacccagttacgcggggtttcgcgtccggcctggccaatgccgattggcaggacttcgacgctgttgcccagcggcgggtaataatagagacgcatctcggcgacgttgatgacgatcccctcccgcacggtgtcaggcaggatcagctgttgcggaatggtcagcgtcgaaccggagcgtggtaaatagacatcgaccccggggttggcttccagcatattgcttaacccctggccgtactgggcggcaaaactttccagcggctgggtgttattgtccggaacggcaatggtaaatgcgctgcccaccaaacggctcccctccggcggcagcggatagctgacggccagcgcgccgtggctggcaagcagcatcagcgccgtacagagtaatttcacacgccgcatcgtcattttcccttcctcagtcgcgactcacgtgtgtgaattatagcgttatttccactccccgacccgctggccagcatttccttaaatctgatagtcgattgcggcctcttccggctccatcgcctgacgcttaatctcatccagcgacagtccggcattgcacaattcgataaagcgccaaacgtaattccgctgcagctggccccgcttcagtcccaaccacacggtattggcatcgaacagatggcgggtatcaagacgcgtaaaggtgtccgcttcccgggcatcaccggactgctcggcgaccagcccgacgcccagccccagctccacgtaggtcttgatcacatcggaatcctgcgcgctcagcacgatatccggcatcaaccccttgcggttgaacgcctcatcaatgcgcgaacggccagtgatcccctggcggtaggtgattaacggccagcgggcgatcgcctccagcgtcaggggagaaacctgcgtcaaaggatgatccttcggcaccagcaggctgtgatgccagcggaaccaggggaaagccgccagcgtcggatcgttgctcaggcgctcgctggcgatgccgatatccgctccgccgttatgcagcagcgcttcgatttcctgcggggtaccctgcaccagctcgacgcgaacatctgagaacagctcgcggaaagctttaatgaccggcggcaggctgtagcgcgcctgagtatgggtggtggcgatagttaagacgcctgacgcatcgttagtgaagagatccgccagccgccgaacgttactggcttcattgaggatccgctcggcaatcgataacagcgctttacccggctcggtcatgcctaacaggcgtttgccgcggcggataaagatctcaatccccagctcctcttccagttcccggatatggcgactgacgcctgactgcgaggtatagagcatattcgcgacttccgtcaggttgtaatcctgacgggccgcctcacggataattttcagctgctggaagttcaccctttcctccgggccaatggacttaacgtatctgctattgttaaagtctgttgtcccaggtaacaaataataaaaaccagcaacttattccttaagagaatataccctaactgaccagctgcagttcacggttttccagcgatgggcggctcaccagagacagcaggatctctttcaccgcctgcgcctgcggcgacagactgccgcgagccgacatgttcagcgacagcgacaggctcattgaaggcgtgctgatccgcgccatccagccgttcgccgccccgcacagggaacgggcagcggattccggtaacaccgtcgcccccatgccgctggcgatggccgcggtcagggtggtaatggattcgatctcgccgataattttcgccgacagacgacgcagggtgaatgcctcggtgacccgcgcccgcactgcgctgtaatcgcgcggcaggaacaggttcatctccgccaccgccgtgagatccacactctgccccgggcagtcgcgggtgccgaccaggtaaaggtcttctttcagcagcggctggctgacgatgcctgccaccggcgaacgctcatagagcaccgccatatccagctggcccgccagcagcttgtcattcagcgctgtgccgctgctctcctgcagatagaccatcacctcgggcaactcattgcgcaccgtttgcagcaacggcatggtaatggcggaggccgcggtgcccggcgccaggccgatcgacacctgaccacgcagcgtctggccgacgttattgaccgccagctgcgcctgctcgcactggcgcaggatagtgcgcgcatgggtgtagagaattttaccggcttccgttggcgtgacccctcgcttggtgcgtatcagcaactgctggtccatttcaccttccagggtcgcgacctgttggctgagggccggttgggcgatatgcaagacttcagcggcctgggtcagactgccgatatcgacgattttcacaaaatatttcagtcgtcttaagttcattttgcctcctgtaaggaacgccagcgtcaacgctgggagtatgatgcactggcttttgcaatttgcttgccagctttgcatttcctcggctgtcgcccgccgcaggcagtgttataagggatagtgatagcaattcggtttttatttgcccggtaagcagattgtggtatgccccattaggggtaccttcgcactacaacggtgcaatatggtgaaaaaaacagcgcatgggtggcgattgctgaaattgtcagcagtcgaacgcaattctttgaatcaggctttgacaaggccggatggcatcgttaatatgcgccccgttcacacgattcctctgtagttcagtcggtagaacggcggactgttaatccgtatgtcactggttcgagtccagtcagaggagccaaatttaaaaaagcctgctttcgagcaggctttttgcttttcagcgccggtatttctgccggaaggcgaatggccaccctccggcggttgcggctttagcgtaaactctcttccttcagatctatctcccgcagcacctcataaaaagtgatatcgctgatgttatgggcgcggcgcagccggaacagctcctgacgctgggcgataatgacctctcgttgcatatatttctccagcctggcgcgcttagccagctccagcccgacatcctgcccctcgtcattgtcgttatagtgaagccgccgctgataggtctcgagcagcatattgccggcatcggcccgcagggcctgctcactgggatcctccaccggctcgtccagtagcgcgttaagacggttaatggccacctcggtcatcacggcgccaatgtcatccttaccggtgtcatgcggaagatcatcggcaagataacgagtcataaacggcagaccgatagccgccaccaccagcgacatcaggatcaccgccatcgaaagaaagatcagtagttcacggcccgggaacggcgaaccatctgccagcaccaccggcagcgtcagaataccggcgagggtcacagagcccttcactcccgccagcgccatgacggcgaggatactgaagcgtggacggacggtgatggccttgccccgacgtttgcggcgaaaaattgtcagcttcatcgacagccatacccaggcgaagcgcatcagaccaagcgccagggtgatggccacggcgtacagcagcagataccagggcgaagagacgccggcctggctggctaccgccggcagcgtcctgagcatgcgcggcagctgctcgcccagcatcagaaagatcatcccgttgagggtggtctgcagcatggaccataccgcgctgcttttcatgcgcgtcgccggaagccggggccccgacagctgctcataatgcatcgcaatgccggcggcgacggcggcaagaatgcccgagacatggaacgcctcggccagcagataggcggcgaaagggataagcaggctgatcaggatctggatggctggctcctcgcgggtgcgccgaaccagaaagttattacatttgccggtgacccacaccaccacgaggccactgaggatgcccccgaaggccatcaggaaaaatttcaccaccgcgtctcccggggagaagctgccggtcagcaccgcggcgatggcgaaattaaaggcgacgagccctgaagcatcgtttaacagcgactccccttcaagaatatgcgccatccttgagggaagcggcgagctggcggtcattgccgataccgccaccggatcggtaggcgacagaatagccgcgagggcgaaccctgccgccacggtgatagccgggatcagccagtgaataaacaggccaataccgagaatagtcaccatcaccaggcctatcgccagcgataaaatcggcttcatatcgcggaaaaaagcgtctttggggatgcgccagccatcgaggaacagcagcggcgggataaacagcagtaaaaaaatatgcgggtcaaaatcgacctgaaagccactggcggccagcgcggcgcccgcggcgatttggatcagcggtagcggcactttaacgggcagaagatgggacaggaacacggtcaccacgatggccatgataaagaccagcacgatagcaattagcgacattcatcccctcctctgacggcaatattcattctgtacatcagactgttaatcctttttcgcaggtgttgtttcggtaacagattatttacccagtcaccgataatttaagacagacgtcattgtctgccggcgataatatttaaactgaggtggcaaccggtgccggatcaggggtgacaatgtcttttatcaagccgcgtttgtcaatccgctatcgtctgcaaatcatccccggccggcattccggggagaagtcctcacaggactgtcgaccggggacttcgcaaattagcctcttcacatggacaaaaccactcaaccgctccagccctccgctgtttatatattcccaatattattaattcgtattatgcattgtgaatatggatattaatgaccagtctaatatacccggcagagttatatttcgtgcccccgccggcagtgcgaaccacgtatttgcgataaataattcttaacgcccccccatttcaggatgattggacagccagccttacgctacgcgcaatgcttgccctccccctgaattgggcgtaccctgacaaacaattaaaccacacggtctaaatcatgaatcccaatacctccaccgtcctgaagccccgccgcggccgtccacccaaggtcgatcgccagtttgacgatacgcgtcaggcgctgattcgctcaggccttgaagtgctgaccgaaacgggctatctcgcggcgggtattgatgcggtgatcaagaatatcgccgtgccaaaggggtcgttttatcattgctttaaaagcaaagaggcttttggcctcgccgtgcttgccgcctatggcgacttctttgcgcataaattagataaattcctgctggacgacgccgtgccgccgctggaacgaatggcggcctttgtgcgtcatgccggtcagggaatggagaaattccagtttcgccgcggctgcctggtgggcaacctgctgcaggaagccccgttgttacccgagacgtttccccaacggttgatggctatcctggcggcatgggagtcgcgcgtggcgcgctgcctgcgcgaagcgcaggcagccggggccatcgccagcgacgcctcaccgcaggcgctggcccaggtgttctggatcggctgggaaggcgcggtgatgcgcgccaggctggtccagtctgccgcaccgcttaaccagtactgggatttttttgcgcacagtatgacaacaaaaacacctgcacaggacggcgctagcgccgataacccccttccgacgaggaatactctgtcatgaaagcattagttctggaccagatcgacaaccgcaccgtcgccactgtcaaagatatcgacctgcccgctcttgccgaaggcgacgtccgggtcgccatcgactggtcgagtctcaattataaagacgctctggcgatcaccggcaaaggcaaaattatccgtcagtttccgatggtgccgggcattgattttgccggtcaggtgaaagaaagccgcgatccgcgctttgttaccggccaggccgtgatcctcaccggctggggcgtgggcgaaaaccactggggtggcctggccaccgaagcctgcgttaaaggcgactggctggttgctctgccggagacgctcagcgcgcgccaggcaatgatcattggcaccgccggctttaccgcgatgctatgcgttgatgctctcgttagtgcgggtgtcacccctgatagcggggatatcctggtcaccggcgccagcggcggggtcggcagcaccgccgtggtgttgctgaaagcccttggctaccgggtgacggccgtatcgggccgggaatcgacacacgattaccttcgccagctgggcgccgatacgatcctgccgcgcagcgacttcgcggagacccgtccgctggagaaacagctgtgggcgggcgcggtggataccgttggcggcccagtgttggccaaagtgctggcgcaaacgcaatatcgcggctgcgtcgccgcctgcggtctggccgggggcttcgatctgccgaccaccgtgatgccgtttattttgcgcaatgtgcgtctgcagggggtggattcggtgatggtgccgaccgctgaacgcgacgccgtctggcagcgtctggcccagcttctgccggagagctactaccagcaggcggccactgaaatcacgctggagcaggcgccagcgtatgccgcagatttcctcagcaataatattcatggtcggacgctggtcaatatcggccagtaatcctcttctcccggcgcccgtgcggcgccggatcccgagagggatcaaggcatatcatttccttccccacgggattatgatgacgcgaacgaatagctctgcgagtggtaaaaaaagtaaatggatgtcataagcatcattatggcggcgggcaagtcgtccgttgacgtcgcgctgtatacgctgttgccgatcatggtgatcatgctgatcatcatgaaataccttgaggtccgcggtatcctcgatgtgattgttcgctgggtggccccgctgctgaagcccttcggcttaaccgggatgagcgccttcgccctgatccagattaactttgtcagctttgccgccccgctcgccacgctgtcgattatggataaacgcggcgtctcggaccgacaaatggccgccacgctggccatggtgttcgccatggggcaaggcaacgtcttctatcctcttaccccttttggtctgcactggctggcctcgatcgttatctcggtggtcggcggcctgtgcgcggccgccgtcgcctggcacgtcaccggacggcgcttatcggtcgccgagaacccccgcgcggaagcgctgccgaatgccgagcagaacagccagggaattctggccgtgattaatagcgccggctccgacgccatccgcctggcgctcggcgcggtgccaatgctgatcctgtcgttaaccatcgtcgggctgctgcagggcgccggggctatcgacctgctgcagcagctgctgaagccgcttctcagctggctgcacatcccccagaactttgtgctgccggcgctggtgaagtgcgttgccgggggcaccgcctactttggcgtcatttccgagctgatccagcagggcaaagtcaccgtggaccaggtcaacgcctcggcaggtctattgatccagacctttgatcttcccggtatcggcatttttcttggcatcagctcacggtttgtccgcctgttccgcttcgtggctcccgcggcgatcgtcggcatcctgctgcgtaccgttctgcacctgatcctgttttaacgcctctgctctggcctgcgctttcaggcaggccgtcaccgccgcctgttcgccgcaggcgatgcgctcatcgacgcgcgtcatcatccatggaaagaatggattggaggtgacgcgcattaacgtctccagccccacgctcagcgtcccggtctctccgcgcagtgaaatggtgcccaggctaatgccgtagcggttcttctcgtccggctcgcgaccatacagcgagtcgcccaggggaaacggcaccgccacatgcgacaaagagtacatatccgccggccaggccaggtgtaaaggataacgatgctcttcccgttcctgggccagcgtggtccgggcgacggtctgcagcgtgtgcgccgtcgcgttggtcaccaccgtggtggtataggcccgcggcgccgggggcagcagcgtattcaccgccgcatagagcgcagggcgaaacaggacccggagatccgccgcctggttaatatcgaacaccaccagctcgctgccgttatccggcagatagcgatacagggactccaccaccgcgcgggtgctgaccgtggaatccatcaccgactgaaaggtgaggatcggcggcagcgctttcagctcgccctgccgggccgcgcggataatctgctgctgcagcgcctggctcaataaccacgattgtctcgccgccttgaccggaaaggagttgtacttgaacggattaaactcaggcgccacgttcagccaggccgcgcgggcgaacgccgggaagacggacggtagcccggcgaggccggcgaaacgggcaaacgcggtcacgccgatcatcggcgacagcagaataatctgctgcggctgacgcaggtggctatcctccaggctatcaagggcatacttgagcgccagcgcgccgccgttagagtagccgaccagatgcagcggcacgtccgccccggcaaggcgggtcgcttcgcgtaccgccagacgcgtcgccgccagccaggtctcccagtcaaccgccgttaacgcccccggcgcggtgccgtgtcccggcaaacgcggcaccaccgccacataaccccgctgctgccagagttgcgccagatagcgcacgctgtagggcgaatcggtcaggccatggaggagcaccacgctgccgcgcggcttgcccagcggcatcaacacaaaagaacggttccagtcctgctgaaactgccccggccagacccggctgtgacgataaaagcggttgaccggggttttatcttcctccggcaaagcctctgtcacctcacgctggagatcggcgaaaatcgtcttctcccgcgccagatactgggcaaaggtcgcctggtcgatctcttcggccgacatctcgttgccactccaggtatgccagcgatgcagggccgggccgcgctgggactcatagatccgcccggcgagaaagaccaccagcagcgccagtaccgcaatgctcccttttttcagcagtgagccgataacggcgcccgacgttcgccagtgtcgaaatagatgcttcatgacgctctctcttatatttattgcgtagccggacttatcagccctcttcctgacaggctattctcacggtctgcttttcagcatagtcatcgcttcctgcaaattaaacctggcagatcattcccccccggcataaaaaaacctagcgcacagatcaacaatcggttgcgtatttttaaacactgcataaaccaaggggataatcttattgtcagatttttaagaaacatgaattatcgacgcacatgtcgctatgagaggataaaaaacagatggagtggtgggtaaaaaaagtacaggacaacgcttcggccagcctctgccgcgtcgtgcttcagagcggtgcgctggagatgatcgcagagattgaagcctgtcgcctccgcctgcgggaaggggataaactcactccgctggccgatgcgcgctattgtctgaataataatccgacgcaaactttgaagatccgcaacgccactcattatagcagcgagcgttggacaaacgccggcaaataacacgagcccgctccctttactggttatggtctgagtattgtcgcatttgacagataaattctccttcgcccttttcccgctgtgacatactatcgggaatgtcagcagacctgaaacaaggagcgaatcatgaatatcaaggccgccagtctgaccccggaacaagcgcttgccgagctggaagcgcgctatgaagcctcggtcacggcgttacgcaaagccatcggcgactatatcgaccataatacgctccccgataccgaagcccgcgcggaaggtctttttgtctatccgcagctgtcggtctcctgggacggcgccgatcataaagccctcaaaacgcgcgcctggggacgtttcacccatgccggttgctataccaccaccattacgaatccgaaactgttccgcaactatttgctggaacagctgaccctgctgtatcaggactatggcgcgcatatcagcgtcgagctgtcgcagcatgagatcccctatccttacgtgatagatggttccaccctgacactcgaccgctcgatgagcgccggtctgacgcgctatttccctaccaccgagctgtcacaaattggcgatgagaccgcggatggcctgttccatcccaccgagttctatccgctgtcgcactttgacgcccgccgcgtcgatttttcgctggcgcgtctgcgacactacaccggcacgccggcggaacacttccagccctacgtgctgttcaccaactatacccgctacgtggatgagttcgtcagctggggctgcagccagatcctcgatcccgacagcccctatatcgctctctcctgcgccggcgggatctggatcaccgccgagaccgaagcgccggaacaggccatttccgatctggcgtggaagaagcaccagatgccggcctggcatctgatcacccacgacggcaaagggatcaccctgattaacattggcgtcggcccggccaacgccaaaaccatctgcgatcatctcgcggtactgcggccggacgtctggttaatgatcggccactgcggcggcctgcgcgaaagccaggccatcggcgactatgtgctggcccacgcctatctgcgtgacgatcatgtactggatgcggtgctgccgccagatattccgatccccagcattgccgaagtgcagcgcgccctctacgacgccaccaagcaggtgagcgggatgcccggcgaagaggttaagcagcggctgcgtaccgggacggtggtcaccaccgacgaccgtaactgggagctgcgctattccgcttcggcgctgcgctttaatctcagccgcgcggtagctatcgatatggagagcgcgaccatcgccgcccagggctatcgcttccgcgtcccctacggcacgctgctctgcgtctcggacaagccgctgcacggtgaaatcaagctccccggccaggctaaccgcttttacgagggcgctatctccgagcatctgcagataggcatccgggcgattgacctgctgcgcgccgagggagatcacatgcactcgcgtaagctgcgcaccttcaacgagccgccgttccgttaatcgtcgatgacgtgggaatcgtgagataaacgctgacgttacccgccagggagcgtcagcgtccggataagcgaaacaaacgacccggcggtgtttgtccacggaagaaaggtggtagacagaaaagcaaaaagcctgctcgaaagcaggcttcttaaatttggctcctctgactggactcgaaccagtgacatacggattaacagtccgccgttctaccgactgaactacagaggaatcgtgtgaacggggcgcatattatcgatgacgcccggcgctgtcaaagcctgttttcaataaaatgaatcgtttgccgaattattcttcactttgcgcaaaaaatggcgtttagccttgcaaacgactcagctttcctccgatgaagccttcacgcgcggatatttccacagccagcggccgctcaccatgcggaaataaaacagcacgccgcgcaccgcccagtcgagcaccatccctaaccagacgccaatcacccccatccccagcacgatgcccagggtatagcccgccactacccggcagccccacatgccgagcatcgacacccacatggtgtagcgtacgtcacgggcgcctttaaaagcgcagggtaaagtccacgacagcgaccagatcggcataaacagggcgttgagccacagcagctgtttaaccacttcttttacatcttcttcatgggtgtagaacgaggcgataaagccggcgaagggagcgctgccccaggcgatcagcgtcagaatgatcgtcgacagccaaaatacgtgccaggcctggaattcagcctgaccaatctgcccttttcccagccgcttgccggtaatgatcgtcgaggcagagccgagggcgttgcccggcaggttaattagcgaggccaccgaaaaggcgataaagttgccggcgataacgttggtgcccatcccggcgacaaacatctgggtcagcagcttgccgccattgaacaggacagattcgatactggccggaatgccgatccccatcacctcccagataatggcgaagttaaagggtttgaagtagcccctcagcgacagccgcagcgccggattgaggcccaccatcagcacccagatcgtggctatcgcgccaatatagcgggcaatggtcagcccaagcccggcgccgacaaaccccagccccggccaggagaagatgccgtagatgagcacgctgctgattaagatattgaggatgttcatcccgccgttaatcagcagcgggattttggtggtgccggcgccgcgcagcgccccgctgccgatcagcgcaatcgccgccgccgggtagctcagcgccgtcagttccagataggtcagcgccaggtccttgacctgggcggtggcatcgccggcgacaaaatcaataatctcctggccaaaggcatggatcacccccgccagcaaaatggaaaacagcgtcataatggccagcgactggcgcgcggccgccctcgcccgccgccgatcgcgcttgccgaggctaaaggccaccaccaccgtggtgcccagatcgatggcggcaaagaaggacatgatgaccatgttaaagctatcggccagccccaccccggccatggcctcttttcccagccagctgacaaggaaggtgctcaacacccccatcagcagcacacaggcattttccagcagaatgggcacagcgagagggctgatttcgcgccagtacagcacacgataacgctgacgttttttaaaccaggatgtccgttcgacggcctggcgtacggcggaggtgacgttcaagagagaccttagtgagaaatgttgaaacaacatttcaaatgatgattgagaaatggatatcctgcaaagtattttccgtaataattgtcggaaatgacaacaaattgtcgatgtaagcggcagttgcacctgaacaggcgaattgatgtttgacaaaagttttttcgccgctaagatacgactccacacgattcctctgtagttcagtcggtagaacggcggactgttaatccgtatgtcactggttcgagtccagtcagaggagccaaatttaagaagcctgctttcgagcaggctttttgcttttttgcgtcgctgacgttaactcagcatcgcatccagcctggcaagcacctcgttgacaacgacgtcaggtatgcgttccagacgcttgcctttccctaccgcctccctacgccccgcgtgtcctccgtgaacgcaccccagctcagcctgaaaaagcgcctgccagtaggatgaattcactaccgtttgcgggtgagatagcgtggattatccactctgtctaacgttatacccggaggcaccatgaacctcagacaacagcaacagcaggcgttcgatcgcagcggagaacctcttatcgtcggcaacgtcagccactgcccgctgccgccggagaccctcgccgcactgggccccgattccccctatgtggtgcaggtatacggctcaggcctgaccggcgaggtttatcgtctgcgcatcgccggcaaggagtacaatttaaagaaacgtcgcgccgtcgccggcgttgccaacctcaacggccagctgtcgtttttaaatgaggtacagcgtcggcaagcattgcaacagctgaaggatgacccggtcaccacgccgcgcttcacccacatcgtcccaacgctgtatgccgattatcgcctcggcatcctgctctccccctggatcgagggcgagccgatacaccagttaaccccgtcgctgatcgcccagctatttactactctggaagcctgcgaagagcaggggctgatggagtgggatctctgtagcgggaatctgctggtggaccggcaggagcagctgtggctgttcgattttggctatatgtatcccttcgacccgctgagagaattcaacagcaatggtctggccgacccgctgttccactttgtcgaacgttttgagactcgcttcttttttagctggctgatgacccggatccctgacgccgaacagcagctggcgcaatatcgcgagatgaagcggctggcggtcgaaagctaccgccggaagctggtctggcttcgcgcccggcgcgctgacccgctggtgctggctcactttcagcagttgacggcgcgctgggagtcagcgctggcggaccctgccgcgctgagccggctgtttgccgtagaggcctttcgctcacatgtgctggatattgaagacgacctgcatggtcagtcctgtaccttactcaccctgcaacgcattgactgggtgataaaccagctggaacagcattatcgctttatcgccgacgaaggcggcctgttttacgataacgaagggaaatcgcagcaggcgctgctcagcagctatgcgcagaagcggcagcaggcgcagcagtacctgttgagtgccaccgccgcaaaggattaacggcgctcgcgtccctgcttctgcttcgcctggtacatcaggcggtcagcggtggccaccagcgcgttgagactgggatggctggcgggatcatattcgacgcagccccaggagaacgccagctgccagggattggccgcctgctggttgaaacgcgccacgttgtggctgagcgtctccatcgccgtcgcggcatcgtggcggctggtattggcgaacagaatgataaattcgtccccaccctgcctcgcgaggatatcggactcgcggaaggccgctttcatcaagtcggcgatggcgatcagcgcgcgatcgccctcttcatgcccccaggtatcattgatgtgcttgaagcgatcgaggtcgacaaacgccaggctcaccggctcatggcggcgctgggccgtcagcagggcatactctgccagggtgaggaatccccggcgattaaacagtcccgtcagctcatcctaggttgccgcatccagcaccttgaactcatcctccacgatcgccgccagatcgcttaagatctgcatttcatgggcggaaaacgatcgcggctggtgatccatcaggcagaacgacccgacggtcgcgccatccggcagttgcaccggatacccggcgtaaaagcggataaacggcgcctcaatgaccagcgggttatcgtgaaagcgctcgtcctgctgcatgtcgttgacgataagcgggtcggtttgcagaatggtatgggcgcaaaatgaaatatctctcggcaccgtgtccacatcgagaccggcacaggacttgatatgcaggagatcttcccccaccagactgatggacgccaccggcaggttatacagcgaacgggcaagcctggtcaggcgatcgaagcgttcttcttttccgctattcaacagcccggaagagcgtagcgattgcaggcgacgctgctcgtcgggatgaagtccggctaatttcattgtctctcacttgtctcttgcgcagaattccgccgggtttccgcagagaaacccggcgttttatcctgcgaggggaaaatagtcgtcaggtaccccatgagttaagcagatttcctctgcacgtcaaccggcgcgccccaggcgactggcgcccagggcgctggcggaatgccattaacggcactctgcccggcaaagagggcagatcaggcgcggataaacgccagcagatcggcgttgatagtatcggcgtgggaggtatgcatcccgtgcgggaagccaggataaattttcagctggctgttcggcagcagcttgtcctgcaggatggccgcatttttataggggaccacctggtcgtcatctccctgcatcaccagcaccggcaaagtgatcgacttaaggtcttccgtctggtcggtctctgaaaacgccttaatgccttcataatgggctttggcgctgccgatcatcccctgtcgccaccagttctggatcgtcccctgggatatctctgctccatcacgattgaagccatagaacgggccagaggcgacgtcgagatagaactgggcgcggttcgccgccagcgctttgcggaaaccgtcaaacacctcgatcggcgtcccgcccggattctgctcggttttcaccattagcggcgggacggcgctaattaacaccgccttcgccacccgcccctgcggctgaccatagcgggcgacgtagcgtgcgacctggccgccgccggtggagtgcccgacgtggaccgcattgtgcagatccagatgttccaccaccgccgaaacgtccgccgcgtaatggtccatatcgtgcccctcgctaacctgatcggagcggccatgaccccgacgatcgatagcgatgacccggaacccttcggcaaggaaaaataacatctggttatcccagtcgtcagcgcttaacggccagccgtgatgaaagacaatcggctgagcttcctttggtccccagtctttaaagtaaatgttgacgccgtcttgggtggtgacaaatgccatattacagactcctctttcaggataaccagcccgcaggcccgtgcctgggctgaacgccgacggcggccggcaggagtgccgaccgcacaggaatgtgatgcctgtaacagtgtagaagatatttaacgccgggcgggacaacttaccctgtctcgcttgattcgccgatcctggaccagaccgcgtctggtatcaggccgcactctcctgctggcggatccgcaccatcagcgcgccgagcagcgcccagtcaagcagcacggcgaaggcaaagcagacgccatggcgtcctcctcccgcagtatgccaggtcagcagcgtcgccgcgatggcgatagctacgctcagcaccgtggcgccgctgacccgcatccccggcagcgccgtcctacccgccgcaatgcgccaggcgacagccgctcccgccccaccgcacgccacgcccggcagcagtgccggccagtcctgcccgccataccaggccaccagcgccagcagccagccggccgctgacagcagaaaggcccagcgcgtcgccgccaggggtgagcgataaagccaggattgtccgcgagtgaatccccacccgacgccaaaggccgcaatcagcgccgtcagcagactcagcgtgccggtcaccccgataaccgggggcatgattaacagcaaggccccggcggcgatgaccacgctaagggcgatagcgcggccgcgggggtcgatcgttgccgcggcttccgcggcggtgtagcggcttacaacgtgcatagttgactcctgacaggcgaagctgcatgaatttaattcatgtcattgtctttacatgcccgtagcctatcgccactatattgccttacacaaacgcatagttttcagccatagatgagaaaaactcagccatgagaccaccccgtctgccgccgctgggggcgctacgcgcttttcatgccgtcgcccgccaccgcagttttaaacaggccgccgaggcgctcggcgtcagcgcgacggcggtcagccatcagattaaactgctggagtcggtgctggagtgccgggtctgcgaacgcagcgcgcagggcgtcagtctgaccgctgatggcgagatcctttacgccgccacccaacgcgcctttagcgccctggaacaggccgtcgtccagatcgctcatgcccgtcagccgccatccttaaccgtcaccaccacctccaattttctcacccactggctggtgccgcggctagcggatttcaccgcccgctttccggctatcgacctgcggctacacaccagcgtcgaacgagtggatctgcatctgggcacggtagacgccgcgattcgctatcgtgaaacgccggagccggacctgtactgcacgctgctgtatgaggatcgctttatcgtggtcgccagcccgactctgggcctcagccggcctgaagatctgcagcgggtgacgctgtttcacgttgccaaccggcgcgtgccagctgattcgccgagctgggagaactggcgtcggcgctatggaccgccgacgctgaatattgatgcggggttaacctttagcgatgagacccatgccctgcaggcggcggtggccggtcagggagtggtgatcgccagcgaactgctggcgcgggatctgctgcagcgcggcgtattatccgcgccgttcagcaacgcattgcctggcgcccgctactacctggtcactaccgaagcggtagcgcagcgggcggatattatcgctctgcgggagtggctgctcagccagatggcgtcgggcgacggcggccatccgactgcgggatagcgggcttaccagccgcagacgttggtctcttcatcggactcgtaaccgcgaacgatattgatcagatccttcaccgcatcagccgcggtgagtgggtcgcgcagtgccgccagcgaggaaaaggttttatcaaccgagacgccgttattattattggtgaccgtcaacagaaactccccctcttccctgtcgtccggcaacttgctcagcaggtcattaacggcctccaccgcctgctgtggaatatacaacaccattggtttgagaaatattttttcctgcttctggtgaagtcggccattctctagcgctaaggtataacctttattttcactggtcatctcttgttatccctcgatgagaatttttggatcaacataaaagtcgacattaaaaaccgtgtcctctgagagggcctcaatacagtgccacttctccggcggaaagacgccaaactggccggcttcaatagtcagggtttcaacgggctcggggctggtttcatcggcatagccgagatagcggatcgccccctgcatcaccgagagacgagggtagacgccctgccgggtgccggcatccagatggcggcgccagatagaggccggggcggtctctttggtccacagcggcgtgctgcgggtgtgaacgtaatgggtgggaataatgattcgctgcatgattgtgcctcactttaccgtctcaaacgcgacgttcagaaatagcctatatgatgcatatcatataccccttttaaacgttaaggatattattttgttgtggaattttacgcctactcctttttatacctcgcagggattagcgctaagagaaaataaaaaaggcgatttcaggatcctgaaatcgcccggagaataaaaataaacgcgttaaaaatttgttagcgcagcggactcggtttgccgattaaatatccctgaaccaggtcacagcccagcgcctgcagcgaagccaactgctcttcggtctctacaccttccgccacaatgcgcatatgcaggctctttcccatgctgataatcaggcggacgatatccagatcgtctttttgctccggaatattgatgacaaacgagcggtcgattttaattttatcgaacgggaagtagcttaaacgggacagggaagaatagccggtaccaaagtcatcgatggagatctgaatgcccagctcgcgcagctggctgagaatttccagcgaacgggtgttctcattgaatacgtccgactcggtgatctccagatcaagacgtcgcggatcgaggccggtctgatgcagcacctcgataatggtgtcggtcagcgatgtattcatcaactgaattggtgaaacgttgaccgagaccttcagcggcgtcgcccagctggccgcttcggcacaggcggttttcagcacccattcgccaagggcattaataagaccgattttctctgccaccggaataaacaccgtcggcggcacggcgccacgcaccggatggaaccagcgaaccagcgcttcatagccgtagatttcgcgcgtgacggtatcggcgatcggctgatagtagactttgaattcgtcatgggccagggcctgcagcagatcgtcttcaaacgatttgttctcctgcaggcgctgcagcatccccggccggaagatttgcacatggccgctaccctcttttttcgcctcatacagcgcgaggtcggcgcacttgtacagataatcggtacggctttcaccgtcagagatcacgatcccaatgcaggcgtcgatattaatctgcgcatcgtagatctgatagggctggctgatcttctcccggataacattggcccgctcaagggccatctcctcagtgagatcgtaggagagcatcgcaaactcatcaccgccaaggcgatacagcgtctcggaggttttgcggaaaaaagagaggcgactggccagatcctgcagcagcttatcgccagcatcatggccaagggtatcgttcacatccttaaagctgtcgaggtcgaaaagcatcaccacggcgcatcccttatacggacgcacctggttgacgatctcctgcagccgctgccagaaagagagacggttgggcataccggtcagcgaatcatggtaggcatcgtactgcagccggcggttctgcacctgcagcttctctttcgaggcctgcagatcgttggccagcgttttcatacgaacatgggcgcgacgcagattattattctgtcggagcatcagcagaccgagagttatacacatggcgatcagcagaatggagatcaccgagtagatataatagagatgctggattttatcatgggtgatattaacgatattgatatcttgcgtcagggtggcggcggccattgaggtcagcggaccatccagctcgcttaacaccggcaggatctgtctgacctgctccggcgtcatggtatcaacttgtttatcgagcagatgaagattacgaatcagcgtcgcaaccaccgtcttccgctgctcgcttttattgataaatttacccagatcgccctcctgcagaagctcgatctggctcatcatgatctcaagacgcaggcgcacctcatcgtggtccgccccttcggccccaatcgccattcccgccagacgagactccagccgcatatattccgacaccatctgcgacattgactacgagtccgtatagcgggtaaatttttgcaactcactttgtcgctcatgcaccagataagtaatatatccggtgacaacaaataacgacaaaataatagccgtgagtattcgattcaagatccaacccttattctataatcatctttgaaacttgccaggccgatcgggaataatagatctggttctgtaattcagcactgctgtcgtaagggtagacaataaataacgggcctttatcacgaatgcgcatatattgaccgttcatttttaacgccataatgaccgggaatttataaaaatcatcaatcgggataatggtggtgtagtcgttcagcgccagcacgcgggccgatgtgcctttcgcgccgactaaatccatgagtttactaaggggaataccgtcaaaacgaaccttgccggtgtaccagggggtggtggtttctatcgtcttcatccccagtttttccagcattgcgagatcaaaaacggccttgtcgccgacattcatatttccgatttttccggaaatggtcagtacaggttttcctgtcggcgcaggcagtttttcagcataagcagaaggcaacatgacagaacaaaataaaactgcaagaagtagacgcattttactcaccattccagagagggagacacgttaagtgtaaaccatttacgtcgattcttaaaaggtgtccatctttgttatccgttgatttaattaaaagtataagctggatggcaaattgccagaatgttaagtccagggtgtgatttcgaccgtctttcccatcgattcttttttgcgccatctcccccgcttagcaggcaaactactttcctccacggccgctgcgcggtagtctcagagcagacgcaacggtaaaagcgtctcattccaataacaatgaagtacgtgactgacaggacagggtatggattcaacaataagcgtgcagcccggcgaggcgccagattcactacatcgggcccggcgggcggcctggggtagttttgccggcgcggtggtcgactggtacgattttcttctctatggcattaccgccgcgctggtgttcaaccgcgaatttttcccgcaaatcggcccggcgatgggaacgcttgccgcctttgccaccttcggcgttgggtttctttttcgcccgctcggcggaattatttttggccacttcggcgatcgcctcgggcggaaacggatgctgatgatgaccgtctggatgatgggtatcgccactgcctgcatcggcctgctcccctcgttcaaccagatcggctggtgggcgccggtgctgctggtgttcctgcgagcggttcagggattcgccgtcggcggcgaatggggcggcgcggcgctgctctcggtggagaatgccccgcaggggaaaaaagccttttacagcagtggggtgcaggtgggctacggcgtcggcctcctgctctctaccgggctggtatcgctgattagcagcctgaccagcgaccagcagttcctcagctggggctggcgcgtaccgttcctgttcagcgtggtgctggtccttattgcgctgtggatccgtaacggcatggcggaatcgcaggagtttgaagcgcagcagagccaggacaacgcgccgcagatgaaaaagcggctaccggtagtggaagcgctgcttcgccatccgggagcatttttactgattatcgccctgcggctgtgtgaactgctgacgatgtatatcgtcaccgccttcgccctcaactactccacgcaaaacctcggcctgccgcgcgagctgtttctcaacattggcctgctggtgggcggtcttagctgcctgactatcccctgcttcgcctggctggcagaccgctttggccgtcgacggatctatatcaccggggcgctgatcggcactttgagcggtttcccgttctttatggcgctagagagtcagtccgttttctggatcctgttcttcgccctgatgctggccaatatcgcccatgatatggtggtctgcgtccagcagccgatgtttaccgagctgttcggcgccagctatcgctatagcggcgccggcgtcggctaccaggtggcgagcgtggtcggcggcggctttaccccgtttattgccgcggcgctggtcactttctccggcggatcgtggcacagcgtggccctctatctgaccgcaggatgcctgctgtcagcgctcaccgcgctgctgatgaaaaagcaccccgtcgactgacccaccagcggagggcgtaacccgtgccctccggtaaggagaatacatgtctcagttaaccctggccgactgctggcctcgccgtttttccccctcttcgctggcgctgcagttttgcgaggatcccacccaggcggaacagccgctgtttgccaaagccagcgccggcgaggccgtcgcccagctctggcaggcgccgcagggattggtggtgccggggagctatcgtcagtttacggatctgccggcggtcagcgcgcattttgccgcgcgcggctggccggtatggcttcgccgctccggcggcggtctggtgccccaggggccgggcattatcaaccttagcctcgcctggccggtgcagcagccgctcggcgaagccgccgaaccgatctatcattcgctgtgcgctgtgctgcagcgcaccctcgcgcgcttcggcgttgccagccacgcccgggcggtgagcggttccttttgcgatggacggtataatcttgcctgcggagaaggcgcggaggcgcgcaagattgtcggtaccgcccagtactggcggccgctggcggcgggcggcggccacgtggtgctggcccatgcggtgatccttattgacgccgatctgagcgcggcgcatcaggcggcgaacgccttcgaagcgcagctcggcagcgagcgggtctattgcgctgacaagaccgttactctcgcgcagctgcttaccggcgagcgccatctgctgccccgctttagcgaggcgctggcgcaggagctggacgcgtctcgctgaaggtcgctttcaggtagcggctgaaggtttccaccgcgcgcgacacgcgcggggtatagggccggatgacgtacagccgatcggcaaacacatctactggctgccacgccggcagcagctcctgcaccagcccgcggccaatggcctcccgggcgctgaaatccggcaacagcgccaccccaagccccgccagcaccgcatcacgtagcgactcgctgttattggtggcgaatggcccctgcacgttgatggtcacccgagcatcgggcgactgacgggaggcgaacgtccactgcgggcgctgtggcccacggggataggtcaggcattggtggtggcgcagatcttcgggggtctccgggcggccatggcggcgaatatagtcggcggacgcgacggtaagcgtcgcggtgtgacacagcggccaggcgacgtgggtatcggggagcgcctcgcgccgacagtggcggatggcgagatcgaacccttcgctggccagagagaccagccggtcggtgacctcaagctgcagatgcagttggggatgctgatgcaaaaaaggcgcgattgccgggaccagctgctggcgggaaaaggccaccggcgcggtcaggcgcagcgttccccgcagcggcccgccctcatcgcaggcgccggtgaaaatatcccgcagctgaccaaacggctcgttgagctccgccaccagccgcagtccgtcgtcgctgaggctcacgctgcgggtggtgcgatggacgagggttttaccggtcacccgctccagctcgctgattttctggctgatagccgacttgctgatccccagcttttccgcggcccgggtatagcttttttgttcttccagcaccgtcagccagtacagatggggccagtaactctccggacgactctcgctcatgtgattgttcaccagtaaaaacaatgtattcaactatagcggtttttgccggcggcggcatcggctagcatcttgttgagcccatcattattccctaacgataaggagcacctgcatgccattactgacatttgacctgattgaaggccgtacggaacaggaggtcaaaaccctgctggatgccgcccatcgcgccgtgctgcgcgccttcgaggtaccagaacgcgaccgttaccagattgttcatgaaaacaaagcccaccatatggtgattgaagataccggcctcggattgacccgcacgcgggatctggtggtggtgcgggtctataccagcccgcgcagcgaggcgcagaagcagcgcttcttcgccattttgcaggaggagctggcggaacactgcggcctgagcggcgatgatctgatggtgtcgattatcagtaaccagaaaggcgactggagctttggccgcggggtcgcgcagtatcttaccggcgatctgtaacccgcagcccactgtacgcccttagcggcgggctgccgtcgcgatacgctgccgcgcctgctgctcgatattctccagcaactcctggacatcgtcttcatcaatgtcgaggaactggccttccagcagcgcggcgtgaatatcttcccgggtgaccgaaatacccagcggcaccgccctggatttgacctcctccgccgccagcggatgcggataacggcggccaaccaggttattaaacacaatagccagcagcgccagcatcagcgagttgaggagcaccggggtcagcacaaagtgatagccttcgctgtgcaccccggcgccgccgaggatcgccgtcagggccaccgcgccgccggggggatgcagacagcgcagaaaatacatcccggcgatggccagagccgccgccagaccgcaggccagcgccgcatcggggaccagcataccgaccgtgacgccgatcagcgccgacagcacgttgccgccgacaatcgaccacggctgcgccagcgggctgctcggtacgccaaacaggagtaccgccgaggcccccatcggggcaataaaccacagattgacttcgccgagcagccagtggctgaacatgctggtcaccgccagtccggtgccggcgccaatggatcccagcacgatatgccggcgggccaccggcagcgcgtgcggcttcaggcggccaaggaaaatccgcagccgtgaaaacatccccgcaggaataacactcaacatcgcttcatcgctcaaatcatagaaattacttatattttattttctttttttaaccttaaattaacaaccctgtctttcgcaggggatagcgcgcgcggcgatgtccgacggcattgtgctgtgaattctcgcgggggctgatagaatcccttttcggtcagggggataccccttttgcgaattgaaggtcataacccagtgaataataaaatctctttagcgaaagaagtggcatgggccagccagaatatgccgcgtaccctgcgtcaggtcgccgcgctgcccgacctcagcggcgtgcgtctggcctgctgtatgcacctcgacatgaaaatgatcccgctggtgcaggggatcctcgacaagggcgctcaggtctttttaatcacctgtaaccccaccaccgtgcaggacgacgtggtggcctggctggtggagcgcggcgccgaggcctgcgcgtggcgcaatatgagcgatgccgactggcaacagtcatgggaaaaagcgattgcctggcagcccactcacctgtgcgagatgggcgccgatatcaccaccctgctccaccagcgcggcgagtttgggaacatcgtggcgggtctggaagccaccggctcgggcgtcaatcggctgggggatattcagccaggctatccgatctttaactgggacgatctgccggtcaaagaggggctgcacaaccgccatatggtcggtctcactgcctggcacaccttcttccagaccactcacctcaccctgcatgagaaaaaagtgctggtgatcggctacggcctggtcggccagggcgtcgcggcggcggcaaaagcttttggcggtcaggtgatggtggcggagatcgatcctgcccgccgtctgcaggcggcctacgacggctggcacgtggtggacctccaggaggctatcgcctcggcggacgtggtggccacggcgacaggcggtaaaaacgtggttaatcgccaggcgctggaccgcgcgaaagcgggagtatttatccttaacgtcggccacgtggcggaagagatcgacggcgattacctgcgccagcacccccaggaagaggtgatgccgtatatcaatgcctaccgcatggccgacaaaaccgtctatctgctggccaatggttcgatgctcaatctgaccgctggcttcggcgatagcctgaacgcctttgacgtcaccctggcggtgatggccagcggcatccgccatattgtcactgagggcatgcgcgccccggcgaaggtttatctcctgccccaggcggtctggcagcaagccctgtaaacccggcgcatcgcccccatcgcgggacgatgcgttttaccatcaggacgacggcgcgctatcgggcaacacaatattgctctgcgccagcgttcccatctggttgtacatcacgctggcggcatccagcaggtgcatcgccagcgcggcgccgctgccctctcccaggcgcatgtccatatcgagatacggccgcagacccagcgcgtcgagggcgatctgcgctcctttctccgccgacaggtgtgaaggaataagataagggtgcgccgaaggggccatgcggcaggcggccagggcagaggcataggagaggaagccatccagcaccaccggcaggccacaggaggccgccccgaggatcaccccggtcatgcccaccagatcgtaaccccccaccttcgccaggacatccagcccgtccgccgggttcggctgattatgggctatcgcctggcgcaccaccgccaccttatggccccgctgcgccagcggcagattggccccacagcccaccaccgcgtcagggtcgctgcccgtcaggacactgatcgtcgctgcggccggggtggtattggccattcccaattcgccgacgccgaaggctttcaccccgtcggcagcgagctggcgggtgagatgcatgctggccagcagcaccgtctccgcctgctggcggctcatggccgccgtccgggcgatattcccgctaccgcgggccaccttgaggttaatcaggcccggcagcgggtcggcatcgatgccgacatccactacctgcaccctggccccggcctgcgccgccagcacgcagacgccggtgttgccccgcaccatattgccggcatgaatggccgtcaccacctgcggcgaaggggtcacgccttcatgccagacgccatggtcggcgcacatgaccacaatcgctttctccgccagcgccagctgcccctgcaagccaggcagaccggccagctgcaccgccagcgtctccagacggccaaggctgccgggcggctttaacaggccatcaatatgctgctgagcgcgcgccatggccgccacatcgggctgcggaatggcagccagtaacgccgaaagtgtttccattctgttcctcaccgttggcgtcaggccttacagcagcgccagtaaaaagagtaattcgcccagctcaatcgccgccccgagggtatctccggtctgcccgccgagggttcgcttcagcgcccatcccagaccccagatcagcaccagggtgatcagcgcggcgcgcagcccctgcagccccagcagggcggtggccagcgcgatcgccatcgccatcgtcaccagcgtctgctgcaggctaattttgccgataaacagattgcccagccccttttcccgcgcatagcgatgacgatacatcagcagcaccgccatcccgcgaccgacggcgcaggccgccgccagggctgcgatggggtggatatcacgcagcagcagctcgccaaccaccagcactttcgccaccagcacgaagatcagcgccagcccgccgtgggtgcccagccggctgtcgcgcatgatctccagcatccgatcgcgggtgcgggcggagaaaatgccgtcgcaggtatcagccagcccgtcaaggtggaatccgccggtgagcagcgccagcgccagcacgccgaacagcgccgccagcgggacgccgcaccacggctgcaggaggagcgccaccgcgccggcgatggcgccgagcagtaaaccgaccagcggaaaggtgacgatactgcgctggtactgttcgatctccaggccctgagataaccgcgccgggaccggcaggcggctgataaacgagagtgcagcaaagaatgacttaatcacgtgaggttgactcctgtcggcgaaagcagcggaagagttctgtcgcgcccggtcagcacctgagtttgtcttctggcgaatcgatcgtcggagaggtgagaggtgttgagatatcgccctgacgccgctgcgtcagatgcccggccaggatgagagaaacctttccgatatcaatacgtttttcgcgggccagtatagcaaagtgtcggtgaggagaggcagttgccggaacaaagttttcgcagaaaaaagcagggaagagagggaaacgcggaacagcccggcgacgctgaccgccgccggaccggcagggtttagccttcgactttggcttcgcccatcactttcagttttttcgagatgtcgcggcgctctttggacagctcggcatttttgatgatgtaatcatcaacgcgatcttcgtaatcgctcttcatgctggcgatgatgccctggatggcttccacgctcatgcccggtttgatgtagtcgctgaggttgtccagcagcagaacgcgcttctggttatcacggatctttttctcaacgtcctgaatttcacgctgcagtttgttcttacgacggtacagacgaacaaactccagtacgtcctggaaagaaggcttagttgtttccatttttacacccctaataattgagattcggattcgtaaagcgactgcgttatagggctaacataactgctagcagccgctgatgacaatgttttttcctttgcgtttatcataaccctaaacgctgctgaatcgaaacaacccatgtggttacccggtgcatctgatgtttatttgcgcaacgcgcggcagatcagatgcgagagcagctccagctggcgcgccagttcgattgagagccaaacatagccatggaccggggtttccgccaggccgtcatcaccctgctctttcagcagctggcgcagttcgaggacgatctcagtcagcttttcattgttggcgcgcacaggctgagggttcccttcgtacagcgcgtgggcgatggacaacagcgtctgctgggtcatctgctgcgtctcccgcagggtgtgcgcattgagcatcacgaagtgacccggacgcgttgcccaccaggcgtttatctgcagctccagcatgcagacgaggttgcggctgacggtctggatagcctcgaagatcgccttctggatgtgcgtctctttgctggcgggggtgatcagcccgcgcattttaaccacgtcattcagcgcctgctggagatgcttttccagccgcggtcgatccaccagatttggcgagaagccggcctggtagaggcggttaaagttggtgacatagctggccatctggatgcgccagtggatgaacgcccgctgcggccagatgccggtaaacagcatcgccagcagcgagccgaagatcacatcgccgcttcgccacagcgcggtatgcatatcgccgggcggcgccccgaccaccaccgacagagtaatgccgatcagcagcgcctgatagggtttcttgcccagcgccagccagccgcagaggaacatcgccgccgcgcaccagaggaccatcagcggcagggagatgagctcaagcttcagcgccaccagccccagcgccgaaccgaggatcgtgccgccgatacgctgaaacgcccgcggcacgacgttaccccagaaggagatcggccccatcaccaccaccagagtgatgagaggccaggttccctcaggcacgttcagcagccgcaccagcaaaaaagtgagcacaaaggccagcgcaatccgcacaccatgcaccacccgataatggcgatacaagcggatctcaaatggcttgagtgatttatcagcgcgcacaaccctctccggcaaaacgaaaaggccaattgtaactgctttttcgcccggagcatgccgggaatgtaaaaaaccttgtccgaaacaggggtaaaccgctacgacgcgacgcgctcaacgggaacatacatgtcgatatcccagtagccgtcgtggttgccgtcgttaagatagacctcaaagcagggctggggggcgatgcgatacgccgtgctctgctgcaggctgtcaaaaaactgcatccacggggtggcgaagtcgtaatccaccacccgcgcgcgggcgcaggcgtaatccccgccggcaatcgccgccaggatcaccccttcgctgttggcgggaatgacataatcctcatccacggtgaccgccgtcgcgcagcgcagtttttccgccggcacttcctccgggttatcgtagtagacggccacccattcgcgggcgggcacctggtggttctcaacccacatcatcagttgctcaaacccctgcttgacggtgtgatcccagggcccgaccagatggaaaccggcgatggttttcttgccgagggtggtgatgctgtagttcatcttgcctcctttggagataaattactgtatgaatatacagttaatttaacaggagatcccccctcagtatgtgcgcgaattcacagagtcgccaccacactgctgtaaaaacaggcgccccgccagcacgagcgacagacgaaaaaaaaccgcctgcaaagaggcggttggcgtggttacagctcgtgatgcaggtaatcgctcattcgcgagaacactccgcctttattgatgctttcgagggtgaccagcggatagtgccccaccaccttgtcgccgtcatacagtgaaatctcgccaacccgctgattggcggcgatcggcgcctcaagatccttcttatccagcacatatttcgctttaatgcgcgacacttccgccttcggcagggctaaccagaaatcctgatcggtgccgagcttaatctgctctttatcgccgtaccagatacgctcggtgccgaccttctgccccttctgcagcacctgcacggtgtcgaagttctgctgcccccagtgcagcagtttagcggcctgctgctcgcggcctttcggactgtccgcccccatcaccacggcgatcagccggcgctggccatccaccgccgaggcgatcaggttgaacccggcgcccgaggtgtggccggttttcaggccatcgacgttcatggttttatcccacagcagaccgttacggttttgctgggtgatcccgttccacgtcaggcttttctggctgtacatgtggtagacgtctggttcgccatgaataatcgcccgcgagagcaccgcgaggtcataggccgaactgtgctggcccggggcgtcgaggccgtggacggtttcgaaatgggtgtcccgcaggtgcagtttttcgacatactgattcatcagggcgacaaactgcggctggccgccagcgacatagtcggccagcgcgacgcaggcgtcgttaccggagtcgacaatcagcccacggctgaggtcgcggacgctgacgcgatcccctggctttaagaacatcagcgatgacccgtcgaacaccgggttgcccttcgcccaggcgtctttacccacggtgacgatgtcgtcaaaggtgatacgatggctgtcgatggcgcggtcgaccacgtagccggtcatcagtttggtcagactggcaggattgcgctgctgatgttcgttacccgcggtcaggacctgaccggtggtgtaatccatcagcacccaggagccagcctgaatggaaggcggcgcgaccgtagcaggtaagtcgacggcaaatgcgcaggaaacgctcgaagcgagcaaagatacagcaataaacaaacggcctttcaacggcatatcctctagatttacagatccgccgtcctttttacggaacttcgcgtttcatatcagggtttaattgcaagaaaatatgacacagcagaggaagttgcttgccgcgccccttctgatgaccgggcaaatcgtttaccataccggtcgcacgccaccacggataatgaacagactatgcaagatagcgtcaaccagcccggatctatatccacgactactaacatcaaaatgtaatacattgatttaaatatacttataaaaacaaaacattagctaatgtactaacttatgtactcgtatttctattcagtcgcgcgataccacgattgccaacgataaatgttcgtacgcagctcgcgcacgcattccgccgtctgcgtgtccgcctgcagatcggcgtcactatcggcgccagcgtcacttattctgcacggctggttcatcaaatccggggatggtgttggccgcgtcgattgctcgctggcgcagctgcacagcagcaggatcaaattcgcacacagtatgattcgggtcgttgacatatttcaccacatcacgataaacggtacggtaaaccactttggcttcagcgttcgccgtcgccgccttcttctcgccagctgctaccgccttctcctgcttcggcagcctttctttagccaggctgtttacgtgctcagaatgcgcgtaccagcccttcagatatcccgcccagaaaatgccggcgcacaccgccagcactcccccacaatcaccagtttcgtttttccgttcattcgtacagcccccagcacgtcagcgcgctttcctgatcccggcgttcaacctgcccgtaacagccgttcttctgtcctttcgttaaccggcaatcccggccgccgtcgaatacccatcggcggatttcagcgcatgcccctttacggtcgccggcattcagcttgcggtagaacgttgaggggaagcacttaccgggcccgatgttgtacgggcagaaactggcaatgccgactttctgcggaggtgtgagcggcacgtgcacgttcttttcaacccacgccagcgccttatcgcgctcgatggcgttaacctggccgcactttgcctgcgtcagccgcataccttgaatgacgggcctaccgtccacacgcgtggccccgcggcaaatggtccagatgccagagccgtctttataggcggtgagactgctcccctctttctcagtcagaaactggtccatcaacaccggcgctgacgcgccagcggccagaagcgccagcatcgcggcgctgaacttagctttgttgctcatagtcgcgcgcctttcgccggtcatcttttattttgaaataaaggttggtgaagtaggtcagcagaccgaaaacgatactggcaagaacgccgatcgccgcccactggctggggctgactttatcgaggagctggagcagccagtaaccaccgctgccaatagatgtgacgtaggaggctcctgccgctacgtctgaaaggttgttcattcgcatgccttacccccgcggggttcactgtgtagtgaagcgagggtaaggcgttaatcaggtcggaatcctgaccttatgaaacgggaagagggaaatccgcaacctgataagcattcgaagctgcgtaatctttatcgaccacttgtttagcgtcaccggataccacaacgccgaaaataacgccgtccacatcaaacagatgtgtcacggatccgtcaatttcgttctctattttgagattggataaatatttaatagccattatttcaccaccttaaaccagatactgtttagccagttctacggattgagagatgatatccgtcgcaacggtatctttcccggtaaggttcatcaccatcggtcggcctaccttcatgccgttccacggactgtggatggtcgcaggataactaccaatacgcggaagattagtaggctctggcacaaccccatcccatgcgttatttgtggccgtagccaccaggatgttatcgacataaatacgcgtgatcagcgtaccaggtgtcgtttcgccatcagcatatacggaaacaacatgtacgcctccattggtgagtaatgcgagttgcgccgtagccgaaacagcaacactgcccatcgcagccccctgcacagaagtgagcacaccggcagtgctgacaatcccccacacgccgaaattaatgtttcctgcggctgtgttattcatccggccaaggaacatcgggtaacgtgtggctgctggcgttccataaccagacgcgggcagttttaatgcaacactaaccagcgcacgtttacatccagcgggtaaagaaaactcatctgttggcagcagcgcataatcggtggtgctgggttcggtgccgtcaaatttcagcatgcccccttccagtactcgtggcgcagggccatttgttgcattcgacccgttatgcaccagatttttcatatttgcatatgcagctaccggagaaccggctgagtaacactgatcattactgaaatccaaaagaccaagcgtctggctgcggataataattgaatctttttcaagatacatggggttattgccgctttgttttggcgacgcatccgatacaacaaaaatacccatattaataacctcgtctctgtcggaactcataagccacagatgcgtatatcccgtagcccacagtgttaggatgcctgtcatcaatgcgcagtgataaaggcgttatatcgtggccgtaatcgataacatcctgggctattgcaggattataattagcaaccaacgtttcgcgcaggtccaggccgtcattgccacgcgcgtaataatttggatatttttgtgaccagtggttattcaattccaaaatacgcgtataccggatgccgcccagaaattcagtggaatagttatccgctgtcaaacttagcaaaataatgtttctcccgcttcgttcggcgaaatctaccatcgcgtcaacatttgcacgaattgcctcaacatcatccgttaaatctacatcggtacctgagcgaaaatcatttattcctgcatcaatccacatttcaacgcctgaataatcctgcagtgcataatccggcacgaaaagcgaaccaggcagacaacgcacgccggtaccctccagcgccgtcagcgtatacacctccgttttggtgttgttgttatcgccgctggctgttcgggtgattcggcatttcacgccacataaccagccgtcgatagttctggtgacgttatccagattcagccactgcgcgtttgccggggtcatgccggacatgagcgcagatgccagcatacgggcgctatcggtagccgtgccgtcgagcagcttcgccactttggattttgcgctctgcgcatcgagaaccgtttcggatagccctgcaccgcgcagcgggtaggtgtagtcgtagcactcccgccagacgctttcgtgcacctggcgggccgctttcagagaatcgacacgcttaatcagccgtacggccagttcttccatcggttatgcccctaaggtgtttttcgctgcctgtgcgccggtggacagcagggacgaacctgtatccgttgcaccttcagcaccgctagccagcagcgaggagcctttcttgcgcttcttgcgcgctgctgcgtcggcattcgcggccttcgcagcagcgtcagctgcttcgtcggcctcagcctgcgggtctgactgaacaacttttggtgtactaccacacataaaattctccttagcccggaacgtgccagccgtgttcggttaatacaggtgcgccgcgtaccggctgcggtttaccctcttcgttcgtcaccgttgcgcccgcgctgccggtggtggcctcagtggctttgcgtacgaggttgaggaagtcgaggttgtcggtaaggctttggtcggtaaggtcggagaaacccagcgattcaaagcgcgcgatgatggcggcgccctgctcgttgatggttgcaagaatggcgttgcggttcgcgagtgcgattgcttcggggtcaaccgttggggcttcagaggtcgccagctgctcgccgctaatgccgacgcccgccagcgctgcgccggtggcgtcctgcggctgcgttgtctcctgccccggtagtctcgatggttttcttctgtcgtgccattgtggtggctcctgtggaacgtggagcctagagtgtgcgcgggggtgttggtcggaatcctgaccaaatggataatttgttaaaaaacggcatgatttaacataatgtacgttatcggcaccacgcgatcggcactcgttaccgatttagcttgaagaggttatttgttgcggtttgctggcgggaaagtgtgaaaatcgactgcataaatcgtgcataaaacagggcggtttttgcatagcatttttagtcggtgaacgccctgtttttgcaagttttcattaccggcgggccgttggttctttcggccaaaaattacgggttccgctgcgaacaaaacgacgcctgatgacctgcaccggaagttctgaacgatgccgatgtgtcacttcacaccagaaagcgattagcgcttcccccgtatgatggttggggctgcttccctgcttccagccaatgagcgctgactttgaaacatcaagcccggtggccagttcctgcagcggtatcccggtgttagtgatatcggtcaccactcgcaaccagtccgttttaactgtgacgacgactggcataggtcacctcgcaaaacgcgcgcacgcgcgagcatagagagcggtttttattagcttttgacgtgcgcgcatggtctttactccttgccgttgttgtctggtgcgacgtcgattagcgtattccccttatgctgagcaatcgtaaggtacgagtttcctttgcaggattcacaccaaagcgcaattcgtaatccatgacgcctagagcttgggttaccttttaaattcctgtctgcggtaagcgaatctccttcgatgcgaacatgaagcccctcgttggcatcttccttacagttaaaaacctccacagcgccgtggtgtacgtaattcccaccgcaatgcgggcaaagcagttcaccttgttcgaaatcaatagctaattgcatcgtgttatctcctttttgcttcgtgtgtttagttactactggtaaaatttaatgtgtaccaacctgacccaacctgtaccaacccttttatataaactcccaaaacagcctatataatcacacgcacatataaagtatttggttggtacagttggtacagttggtactgacctttaaattcaattagttaaaatgtaccaacctgttttttgaggctggtacaggttgttacactggctcgaagatacgagtcatttttccatcaacacgacgttgaacgcgcttataaccgcaattttgcaaaacattactgattcgcatttcttcgcgttttccgatgtggcgcggatctaacccaattgcatcgcgcaacacgtcgctagcgcgtaaaaattcgcaatttcgcggaatgtcattagtcatcaggtcgggcgtctcgagccatttctcgaccgtctcgagccacgcgtccttaatggtgtactgctcatggacgcttgcgccgaggcgttcagcatcgcggaactggataccgccgaggcgcttaaacgtctcgcgggcttcagcccacagcagctctctgtcacggactatggcatcggtactaaccatttcgacaacatctaccggcaaccagcggcggttaccggtcttgtccgcaaggaactcgtcttcgttagacgagcccagggggatacctcgccgagcgaatatggtcgtgaattctttaaattttggtacccatttatcatgcgttctggttacccatgctttaatagactcgaggtctttagtgttaaggccccttagttcgcttatctcggccaccaggcatccggtatcggggttcaagctggtaaccggtaagcagggcaatcgtgcatggcgcgatgaagttgaagccgaagagctgctgaaatctttcaggctgaaacaggatcagatgtacagccagaaggtgataagcccgactcaggccgaaaaactgttgaagaaagaaagcccacgccgctggacgaaagtcgaagcgctgataacccgctctgatggtaagcccaccatcgcgccagaatccgacccgcgccccgcgctcaacgttaaccctgtaaacgattttgacgacgtgtccgaagatgcgatcgccgctgacctcatttgatttaaggaacaacaccatgaaattgaaactcaataacgtacgtctggccttccctgctctgttcgaagcgaaaaccgtaaacggcgaaggcgatccgcgcttctcggcggtcttcctgatggacccgaaacacccgcaactcgaagaagttcgcaaaacgcttaaacaggtggcgaaagagaaatggggcgagaagtgggaaaccatctacggccagctggagaaaaagctcaatctctgcctgcacaacggagacgagaaagccgaatatgagggcttcccgggtaatttattcctgaatgcggcgaacaaagcccgccctactgttatcgaccgcgaccgtaccgcactgattcaggccgacggtcgcccgtatgccggctgctacgttaacgccgtggtggatatctgggcgcaggataacaactttggtaagcgcatcaacgcatcactaagcggcgtccagttcctgcgcgatggtgacgctttcgctggcggcggtgtggcaacaccggacgactttgacgatatcagcgaaggtgcagacgccgaaggtctagtttaaagcaaaaaaaacgcccgactgagcgtcgggcttttttacaagactattggaattttctatcaaaatttgattctatgaggtatatgaatgtcaacgttgagaattggtatggaaatccaagagtttgtagggcattacaaaaatcacccagtgcttttcatcggcactggatttagcctaagatatcttcaaaactcattcagttggaatggccttctagagtttatatcctttgaactgactgagaatgaagagttttactatgatttaaaagctgaatctatggtaaatggggagtatagctatgatctattagcaagtaaattggagttagaatttaacaaacgactagccgaagaccgaaaagggaagtttgtaaaaannnntgacatattttatgacagcatgaaagaaggtataaagttaagcagattcaaaatctatttaactcaattactgacccctctgatgataaaacccgaaaagagtaatgaaattgacgcattgattagagcacgaaaaaatataggctctgtaattacaacgaactacgacagattgtgtgaaaaattttttgaatttaacccactaattggcaacgatattttattaagcaatccttatggctccgtatataaaatacatggttgcgtcagtgactctaacaatatcattataacacgtgaagactacgataatttcaataacaaatatgaattaattcgtgcacagttattatctattttcatacataacccgatcatattcattggttatngcattagtgactccaatataaaatcactcttgaagacaattttttcctatgtaaatgtcaatactgcactagcaaaaaaaatccgtgataacttccttttagtggagtatgcgccagacaatcaatcaatagagataaccgaacacgatattgatattgaaggcatggcaacgattagaataaataaaatcaaaaccgataattacacagccatatacgacgcgctgtctaamctcgtactacctgtatcagcaatggatatcagaaaagttcaaaaagtatggaatactataaaaagtggcggtgaaataaaagttaacatcactgaaaatatcgacgaactaaaaaacgaggatatggtgttggctgtcgggtccgagaaaacagtcaaatatgagtttcaaaccaaaactgaaatgattcaaaactattttaaaatagttgatgaagcaaactcccaacttatttcgctcctaaataagcaagtaatatcaacaagagaaaggtttccaatctttgccttttcttcaatttgcgaaaaccttatcaatgtagataagtacaaatcacgacaaatagacaagattatagatgatctaaaaagatatgttagggattgtgaaaacaattatacatcaattactgacataactaacaatctcgcagactggaaagttattggaggaattatgtatgcagtcatggaagataatatctcccttagtgagcttaaaaaatatcttgaagacaacgcaggtcgatgtgataccgatttcaggaagttattatgcctgtatgactatttagcatactgagcacaccacatctcctctcaataaaaaaaccgccaagaggcggttttttatttcatgaagaaaataaaatgtctgaaaccattctctggggcgacctggaaacctattgcgaaatcccgattaccaacggtacccacgcgtacgcggagagcgtcgaggtgatgctgttcgcctgggcgatcggtaacgagccggttaacgtctgggatttaactgctggcgagccaatccccggccctctatttaaagcccttaccgatcccgataccctgctttatttccacaattcacacttcgaccgcacggtgctacgccacacccacccccggctggctccgccggttgagcgctggcgcgacacgatggtgcaggcgctggcgcacagcctgcccggcgcgctgggggcgctctgcgaagtgctgggtgttccgcaggacaaggcgaaggacaaagaaggcaaatcgctgatccagctcttctgtaaacctcgtccgaagaacagcaagctgcgccgcgcaaccagcaaaacgcacccggtagagtggcagcggttcgttgcctacgccgggctggatatcgaggcaatgcgcgaagtctataagcggctgccaaagtggaactatcagggcgctgagctggcgctgtggcatcgcgaccagcagatcaacgaccgaggcgtctgcatggatgtgcagttcgcgcaggcagcgatcgaagccgtggaccttgaacagaagcaactggcaaagcgtacgcaggtaatgaccgacggcgaagtgcaggcggccacacagcgcgatgcgatgattatgcacatcgtcgaatcgtacggcgttgacttgccggatatgcagcgcagcacgctggaacgccgtattgccgaccctgatctgccgtcgccagtgaaagagctgctggctatccgcctgcaggccagcaccacgagcaccagtaagtacaaatcgctgatgaagggtatcagcagcgacggacgtctgcgcggtacgctgcagttttgcggcgcatcgcgaaccgggcgctgggccgggcggctgttccagccccagaacctgccccgcccgacgctcgagcaggaacgtatcgacgagggcattgaggcgcttaaatccggctgcgccgatttgcttttcgataacgtcatggagctgaccagctccgcccttcgcggctgcattatggcgccagcgggtaaaaagcttgtcgtatccgacctgtcgaacatcgaaggccgaaagctggcgtggctggccggtgaggcgtggaagctggacgccttccggcggtatgacgaaggcaccgggcccgatctctacaaactggcctacgcccgcgccttcaacatatcgcacgaagacgtgaccaaataccagcgccagatcggcaaagtgatggagctgggccttggctttggcggtggcgtggcggcgttcctgacctttgcgctggtctacggcctcgatctcgaagagctggcgaccgccgcgctgccgaatatcccgcgcgatgtgcagcgcgaggctaagagctggtatgacgaatcggtgaagcgtaaagcgacatacgggctaactgagcgcgtattcatcgcttgcgattcgcttaagcgcctgtggcgccgggcgcacccggaaacctgcgatttctggttccagctcgaacgcaccgtacgcgccgccatcgctacaccaaagaaaacactctattgcggctatatgaaagtgcgccgcgatggcgcatggctgcgtatccagttgccgtccgggcgcgcactctgctacccgtcgccgtcgattgagaaaggaaatatcacctacatggggatcaattcctactcgcggaaatggcaacggctcaaaacctacggcggaaagctggtcgaaaacgtcacacaggctgccgcccgcgacgttctggccgggaacatgccactgatcgagaacgccggatacagcattgtgctgaccgtgcacgatgaggtgatttgcgaagcgccggactccgacaactacaccgacgccgcgctttcttccctgctctccactaaccccacctgggcgcccgatataccgctgaacgccggcggctttgaagcgcttcattaccgtaaggaatgacccctatggcattcaagtacagagacagtccgctgtattaccggtctgcgcgcgaagccgtgcagctggagcaagcaggcgagttcgaccgcgcggcgaaggtctgggcgaaagccaaccgggaatcgcgcaacgagctcaatcaggaatggagcgaacggcggaatgatttctgcctgatgcagaacatgcgcgaacggcgcaaggcggtggacgatgagttatcgaggtaaggtcttgttgcagctggtattactgttggtgtttctgctcgtatgtttatgggcgttgctggcgtggactatcgcggaggtgttatgacaatcgtgaaaacgcataccgggaccgttatcaccgtcgacggaccgaagaccgtgaaactgagcgagacgaaaactatgtgggtagtcggcaagaatgagtgctaccacaaagaaaccggccgccgccattttgcagagcgtacgcgccggcgtttgctgctcgaatccatccgaccgatcgaggggcccattcatgcccctctggataaaagctgatggcctacgaacgcgagagcattattgaaaagcaccttgccgcggcggtgaaagccgccggcggggttgcctataaattcgtgtcgcccggccgccgttcggttcccgatcgcatcgtgctgctgcccggtggccgtatcgtttttgtggaatgcaaatcaccaggcaaatcaccacgcgccgaccagctgcgcgagcacgaacggctacgcgcactgggctttaacgtggtggtgcttgatagcaaagatctggaggaaatactgatagatactctagcttcagtaaaatactaacgttttttaggtggcggattttcaacctggttcggctgggtttgtcgcggaggctgatagccattgttaaccggcgcccggggtatttcagtcgttcttggcggctgccagccatcttgggcaatacctttattatctttaactgtcataaattactccgttatctcatcacgtaccagacgcaggtgtactggtaatctcaataaactctatactctcaatctcattagtcaaaatgataattccaagcgtatctctcaacttatgatccagatcaccatcggcatctaaggcccaatgatgctcaagatatatttgctctggctcaggagagcttgaggcaaatgattccgaatcatatctacccccatattttttaccattttttagagttacgataacccagctttttttagcttttttaaaataaaagtcccaaggtctgccagttggatggggcataaaacgtgtgaacccacgtcttgttctgatatagattaacaacactggcaatgctattggaagtataaaaaaggtaaacaagtaaaagaagtaataccaaactggatgttttagcattaaattagatgtttctacgtaataaataggcactaatagcaaagcgtaattaacgcaactataagcaattacatctattaacgtttttgaataatcctgcccgggtcttgactgaaatacatcataaaccttcatacttatgaagccgggcatgacaaacaatacaaaaataaaaaacttactcttctcccatatatccatttttccccctgcgtatcgcccagcacgtaaggccacaattatgacgaataactttaaagagtttaaacccagagtatatcaagatctcatcattaaccacgaaattaatatagagcgctgcaacatctgggcgggtatgggtatgggcaaaacggtggcgacgctgaccgcgctggaagatctcttcatgtgcggcgcggaaacccagccggcgctggtcctcgcgccgctgcgcgtggcggccagcacctggccggatgaggctgtaaagtggggccacctgcgcaatatcgaggtgcagcccgttgtcggtaccgccaaagcgcgcgctgcagcgctggcaaacagcaacgccagcgtgttcaccatcaactacgacaatctggcgtggctggttgaagagctcggcggtcgctggccgttcggtaccgtcatcccggatgagagcacccggctaaaatcgttccggctgcgcggcgggggtaagcgagctgcagcactcggtaaagtggcgcataagcacgtgcgccgctggatgaaccttaccggtacaccagcgccgaatggcctggttgatttgtgggggcaagcgtggttcgttgatcaggggcaacgcctcgggcgcacgtacggcgcgtttacctcccgctggtttaactcgatacaatttcccggccagagctggacaaagctggagccgttcgcgcattcgcaggacgaaatacagcgcgcactcgccgatgtgactatctcgctcgacgccgccgactggttcgatatcaaagagccaatccataatgtgatccgcgtggacatgccgccgaaggcacgccagcagtatcgcgagatggaaaaagaaatgttcctcgagctgaacggcgaaggcatcgaagcgccaaacgcggcggccaaaaccgttaagtgcctgcaaattgccagcggcgcggtgtacaccgacgacgcggggagctgggcggagttgcacgacgcaaagctgcaggcgctggacagcatactcaccgaagcagctggcgcgccggtgctggttgcctaccactggaaacacgacctcgagcggttacttaaagcgttcccacgcggccgccatcttgaccaggatccgcagacgctacgcgactggaacgccgggaaaataccggtactgttcgctcacccagccagcgcaggccacggcctgaatatgcaggacggcggcaacatactggtgtttttctcgcactggtgggacctggagcagtaccagcaaattatcgaacgtatcgggccaacccggcagatccaggccggacacaaccgcccggtattcatacaccacattatcgccgccagcagtatggatgaaatggtgatggaacggcgcaattcaaaacgtacagtgcaggatatcctgctcgatgccatgaaaaaacaggccagtaggccgtaggaggtggttagtggccagcattgaaatgataaccgagaaagaagtgatgcagatgatgcgcatctcatcgcgtatgactatatggaaatataccgagcgttataattttccaaaaccgatacgcacccaccccaaacaatacctgctgtcggaggtggaagcgtggatcttaaacggcggaatcaacccgaaatcttcttgatatgccagaatatcttttctgcgtacagctcgtaggcgtctttctgttctgctatccagtcatgcttattgtacacagtcaggacgccgccaagctcatgccccagcatcttctcgataacatgcggggcaacgccctcttcagaaaggcgagttgccagcgtgcgacgaaagtcatgtgcggtaaattcgccaatccccagtgaaagctcgattcttttcaggaagcgattagcaccggcgatagacataggcttagtcagatcaggcccgggaaagagaatatttccgtaggtcatttctgcctttttcagcaaagtatccgccgcgtcaaaaataggtcgcctgacaacttttttggtcttactcctttcggctggaagcagccagatcccctcttccctgttaaactcaccctttaccgaatcccgtatctcgctatttcttgcgccataaagcattaataactgatgtaacagccggtttgatgttgaaccgcggctgcgctcaatagccagccagatttttgcaagctgattgtaactcagcgtcacctcaccgactgagggcttaacaccgatatccttaggctgcaggagcatcagttcaggtgcactgacaaactgcctgcgaacgcaccatccaatcgccgatcgtagctgaatcagcagctgcctggcacgccgggggttgatacgctcctcttcagtgaacagctccacccacagccgtacggggatatcttcgacaggaacccccgcaaacacatcgctcaaatgtttaatgactgtcgatttatagagcgcctgtgttttttccctcaacgagatatcgacgtaattttccttccagtagtccaggcactcttttaccgtgggcttgttttgggcgcgtagcccgccggccataatccgggggtcaatccctttatcaactgcctcgcgcaaatcagcaaccttgttgcgagcgtctcttaacgttaaggatgggtaacgcccaagccccagacgatgctgtttgccgtcccaacgaaaacggaactgaaagctgattactcctttaggcgttatgcggatcccaagcccgtctgaatcagtgatttcagccgggcccgaatatggtttaccatagagagaacgcagttttgtgtcgctaattgccattctgttttttgtactcagctaaatgatgatttatgtacttatcctgtactcaatatcgcatgtactggcgtaatcgacaatgtttagcggtgtacaaaagttatcaagaaatggcagtcaagacgttaaaacaaactaaaatcaaatacatataacatagagcgcatacatcaggtgacagtaaaaaacgaaagcatacagagcacattcctcttccacgattatgaaaccttcggcaccagcccttccctcgaccggccggcgcagttcgccgccatccgcaccgacgcggagctgaatgtgctcggcgagcccgaagtgttttactgcaaacccgctgacgattacctgccgcagccgcaggcggtgatgatcaccgggatcacgccgcaggaagcgctggccaaaggggataatgaggccatatttgcccgccgcatccacgatctgttcacggtgccgcaaacctgtatcgtcggctataacaacgtgcgctttgatgacgaagtgacgcggaatatcttctatcgcaacttctatgacccttatgcctggagctggcagcacgataactcgcgctgggatctgctcgacgtgatgcgcgcctgctatgccctgcgcccggaagggatcgcctggccggagaatgacgaagggttgccgagcttccggcttgaacatctgaccgtcgccaacggtattgaacaccagaacgcccatgacgcgatggccgatgtgtacgccaccatcgccatggcgaagctggtgaaaacccggcagccgcggctgtttgattatctctacagccaccgcaataagcgcaagctggcgacgcttatcgacgtgccgcagatgaagcccctggtgcatgtctccggcatgtttggcgccgcgcgcggcaacaccagcctggtggcgcccctggcctggcatccggaaaaccgcaatgcggtgattatggtcgatctggcgggcgatatggcgccgctgctggagctcgatgccgatgccttgcgcgagcggctttacaccccgcgcgccgagcttggcgatctgccggcggcgccgatcaagctggtgcatctcaataaatgtccggtgctggctcaggccaataccctgcgcccgcaggatgccgaccggctggggatctccattcagcgctgtctggagaatgcccagctgctgcgggcgaatccgcaggtgcgggagaaagtggtggcggtctatgccgaagccgagccgttcgtgccgtccgaaaacgtcgacgcccagctttacaatgggttctttagcgatgccgaccgcgcggcgatgaaaatcgtgctggaaaccgaaccgcgcaatctgccggcgctggatattaccttcgccgataagcgtatcgaacgcctgctgtttaactaccgggcgcgcaacttccccggcacgctcgatgaacatgagcagcagcgctggttagagcaccgtcgtcaggtgtttacgccagagtttttgcaagcctatgccgatgagctgcagatgctgtatcaacagtatgcggatgataaagagaagctggcgcagctgaaggcgctgtggcagtacgcacaggatattgtctgattggctgaaatacccgggttgcggctaacgccttacccgggctacaaactcagttgggtgtccaacttttggggcagtccagcagcgccgccgggtattgcgtccccagttcacgcttacctttttgcccggtggcggcttcgccttaccgggcctgggcgctggtaccagagtagcccgggtaagacgcctcgcgtcgcacccgggaacgttgcttagcttttcgcgcggctggcgatgatttcatccgccacattacgcggcgcttccgcgtaatggtggaactccatgctgtaggttgcccgtccctgcgacatcgagcgcagcgtggtggaataaccaaacatctccgccagcggcacgtcggcgcggatgatctggctgccgaagcgctcttccatcccctgcaccatcccgcgacgggaagagagatcgcccataatattcccggcgtactcttccggcgtctccacctcgacgtgcatcaccggctcaaggatcaccgggtccgctttgcgtgcgccctcccggaagccgaagatcgccgccatgcggaacgccatctccgaggagtccacgtcgtggtacgacccgaaggtcagggtcgctttcacgtcaaccaccggataacccgccagcacgccggtgcccatcgcttcgcgcagccctttctccacggaagggatgtactcgcgcggcaccacgccgcctttggtggcgtcctcgaagacgaaaccgctgcccggctccagcggctccagggtcagcacgacgtggccatactgccctttgccgccggactggcgcacaaatttgccttccacgtccgtcactttcttgcgcagggtttcgcggtaggtgacctgcggacggccaatgttggcctcgacgccaaactcgcgcttcatccggtcgacaatgatctccagatgcagctcacccatgccggagataatcgtctggccggactcttcatcggtatgcagacggaacgacggatcttccgccgccagccgctgcagcgcgatgcccattttctcctggtccgctttggtcttcggctcaatcgccagcgaaatcaccggctccggaaactccatccgttcgagggtaatgatcgcatccggatcacacagcgtatcaccggtggtcacatccttcagaccgacgcaggccgcgatatccccggcgtgcagttcgtcaacttcgtgacggtcgttggcctgcatcagcacgatacgcccgatgcgctctttcttacccttcaccgggttccacaccgcatcgcctttcttcagcgtcccggagtagacgcggataaaggtcagctggccgacgtaggggtcggtcatcagtttgaacgccagcgccgacagcggctcatcgtcgctcggatggcgttccgccggctggccttgctcatcgacgccctgtatcgccggaatatccagcggcgatggcatcagctccaccaccgcatcgagcatgcgctgcacgcctttgtttttaaaggcgctcccgcaaagcaccgcctggatttcccccttcaccgtgcgctggcgcagaccggcaacgatctccgcctcgtccagctcgccggtttccaggtatttatccatcagctcatcgctggcttccgccgccgccgagaccattttctcccgccactgctgtgccgtcgccagcagatcgtcagggacaggcccatagctgaaggtcatgccctgggtggcgtcatcccacaggatggcgcgcattttcaccagatcgacgacgccggtgaaatgctcttctgcgccaatggggatcacaattggcaccgggttagccttcagacggtcgatcatcatctgcaccacgcggaagaagtccgcgccggggcggtccatcttgttgacgaaggccagccgcggaacgtggtatttattcgcctggcgccagacggtctccgactggggctgcaccccaccgacggagtcatacaccatcaccgcgccgtcgagcacgcgcatggaacgttccacctcaatggtgaaatccacgtgccccggggtgtcgatgatattgatccggtgcggctcgaagctgcggtccatccccggccagaagcagcttaccgccgccgaggtaatggtgatcccgcgctcttgctcctgggccatccagtcggtggttgccgcgccatcgtgtacttcacccagcttatggctcatcccggtataaaacaggatgcgctcggtggtggtggttttaccggcatcgatatgcgcggagataccgatgttgcgataacgttcgagagggatgggtcggggcatgatgcgtccttagtcgttttgacggtcagtctgcggtcgaaatgatccgcagttcatttaactgcgtctatcttagtacaactgtacgagtatattcgaactatttttgctatcattacgattgggcaggttgcggcggcgcgcgtggtatctgaaccggagtttgggtatagtagccgccagccgccgatatgggctgcggctgccatgcgccgcgccaccgccgacacaggattattatgatcgccaatcaccccgaacgagaacaaattcgcctggaaaatgtcctttccgcgctcggtaacccactgcgactggagatcattcgtacgctggccgacggcagcgaactgagctgcaacgccctgcgccaggaggaggtggccaagtccaccatgacccaccactggcgcgtcctgcgcgacagcggtgtgatctggcaacggcctcagggacgggagaacatgatttcgctgcgccgggaagatctggacgcccgttttcccggcctgctggatacgctgctgaaagttatggtgcaggcaggataagctcttctgccgggtggcggctgcgcctgacccggcctacggcggcctcccgtcagcttatgtcccccaggcccggcaagcgccgccctgcaaaaaaatcaggcctcgatgtcgaaccggcgcagacaaaaaaaagccggaggtttccctccggcttttcttatttacatcacgctatgccttaggccacatcttcgtactgcggcaccgggttgcggaagcttttggtcacgcaggccaggtagaccagaccgataccggcccagatcaggcccagaatcatcgagctctcttccaggttgacccacagcgcgccaactgtcagggcgccgcacatcggcaggaacagatactggaagtggtctttcagcgtcttgttgcgcttctcacggatccagaactgggaaatcaccgacaggttaacgaaggtaaacgccaccagcgcaccaaagttaatcagcgccgtcgccatcaccaggtcgaagttaatcgccagcagcgcaatcgcgccgaccaggatgatgttcatcgccggagtgcgccaggtcgggtgcacgtagccgaagaagcttttcgggaacacgccgtcgcggcccatcacgtacatcagacgcgccacgccagcgtgcgccgccataccggacgccagtacggtgatggtggagaagatcagcgcgccaacctggaaggctttacctgccacgtagagcataatttccggctgtgacgcatccggatctttaaagcgcgagatatccgggaagtacagctgcaggaagtaggtggcaaagatgaagatcaggccgccgatcagcgcggtcaggaagatcgcgcgcggaatgacgcgctctgcatctttggtctcttcagacaggttgctgatgccgtcgaaaccggtaaacgagaagcacaggatcgtcgccccggtaatcatcgggatcacgtgcgcgtcaccggaccagaacggacggctgctggccagcgtaccggcgccctcgccttcaaacacgccataaatcaccatgccgaggataacggcaatcagcaccacctgcagcaccacgatcacggtgttgaaattggccacggatttaatgctgcgcaggttaaaggcggtcataaaggcgaccagcgcgataacaaacacccacgacggaatcgaaggcaccagcgcttcaaaatagattttcgccagcagaatgttgatcatcggcgcgaacaggtagtcgagcagcgaggaccaacccaccataaagccaacggtcgggctgatggatttctgcgcataggtatacgccgagccggcagaagggtaacgacgtaccagcttgccatagctcagggcagtaaacaggatagcgattaacgcaaaggcgtaggccgtcggcacgtgaccgtcggtcataccagagacgataccaaacgtatcgaacagcgtcatcggctgcatataggccaggcccatcattacaaccggaactaacgtaagcgttttacgtaattccacgcgagaggtatttggagtagcgttatgcgacatagttatccccttttacggtgaacgccagcgcgtaagcaaaaaattgccccatttctttctattcctcagcgacaacgactgtcggtttttagtaaatatctatccggtacgaagcccggcctcttggtattgaatgatgtgtctttcgaccaaaaaaataaccgacactttaaaaaaaagcgtcggctagtctctggttttcaggccgcatattttgcaacaaattcaacggcgttgacaagatgttatgaagttcattgcgtaagcataatttttaacgtgctaatatctatacggtttccgtatgataaattgtaaaaatagcactatttgctaatagcgtttcccgccaccatttgccagccaaaccgcaggtggcgtcattccaggcgatccacgcgcgttgacgaggcgacagcccgcgcacggtcatgcagaccagctcgccgctgtccagcagaccctgcacctgatagcgcggcaggcacccccagcccagccccaggcgcagcagcgccagctgccccgcggcgtcacacaccgtcagggtctcctgatcgctgagtagcgccccgccctcgccggtggccaccgcccggtaacggcgcagggttcgccagcttagcggtgcgcggtgtcgcgccagcggatgctgtggggcaacgaccagcagcagctccagctcgccgagggggagatagtcataaccgctcagcggcggcggctcgccgagcgcccccagcagcagatcggcctgcccgtcagtcagcggccgccagtccagcagggaggggttcagcgtgaagtgcagccgggtcagcggctgttgttgataaaatgccgcgattggcggcgagagcagcgccacgggaaaggtgctgtccaccgccagacgaaggctattctcccacccctgctgcagcttaaccgcccggatctccagttcgcgggcgatatgcagcacctcccgccctttctccagcagcatctgtccgctgggggtaaagcgcgcgcgatggccgctgcggtcgagcagctgaatattgagatcgctttccaggcggtgaatggtgtagctcagcgccgagggcgttttaaagagctttgccgacgcggcggcaaagctcccctctttttccagggcatccaggatcacgaggacatccagcagtggtttcatcgctaccccccttacggtatgcgaatcaccgctggcggatcactccatcggcatcaccagcggatcggggtactggtactcaaaccccagctcattgcagatacgattgccatctacaatcttgccctggccgccgcccgggctgtcgctgaacaccggcggcggcagaccgagctcgcgggccatctgcggataaaagaggccgcgcgccggatggcggggcgcacatagattatagatgtgcccgcccttcggggcctgcagcagcagttcgatagcggccaccacatcctgcaaatgcaccagattgaccacgtgctggccatccggcgccgacttgccggcgaaaaaacgtcccggatgacgggaaggccccaccagcccggccaggcgcagaatatccaccgacgtccccggcaggttgtgcagccagtcctccagctccttgagcacctgtccgctggcggtttgcggcagacgcggggaattctccttcactgtaccgttgacgttgccatacaccgaggtggagctggtgaagacgatccgcggaatatggtacgccagcgcggtatcgacgatctcctgcaccgcctgtagataaaacccttcccctgccccggtacgccgggccggcagggtgatcaccagcgcatcgacgttcatcagcgcgtcgaggtcctcggtatcacagaccagctgcggctccaggcgcagcggatagctgtcgatcccgcacatccgcgccgcctccacgccatcctgcgtagttttactgccggtaacctgccagcctcgcgccgtcaacgacagcgccagcggcatccccagccatcccaaaccgactatcgcgacctttttcatcccaggctcctgactctttcgctgtgctgattacaggctacgccagccagcggcaactgacaatttcttcgctcaatatgaaatgaattaatgatagaaaaaagcccttgctttctgcggcggaagtggtttaggttaaaggacatcaaatgcatagtcattcacagagaatttttatgaaccgcgttcaatttaaacaccaccatcatcaccatcatcctgactagtctttcaggcgatgtgtgctggaagacgtttggatcttccagtggtgcatgaacgcgcagagagcccccggaagattcacttccgggggcttttttttggaccaaattcggacagattcagacaggtattcagaggaaaagaacaatgttagacaacacccgtttacgcatagctattcagaaatcaggccgtttaagcgaagattcacgcgaattactcagccgctgcggcattaaagtcaatttgcacacccagcgtctgattgcgctggcggaaaatatgccaatcgatattctgcgcgtgcgtgatgacgatatcccgggcctggtgatggacggtgttgtcgacctcggcattatcggcgaaaacgtgctggaagaagagctgctcagccgccgcgcccagggcgaagacccgcgctacttcaccctgcgccgtctcgacttcggcggctgccgcctgtcgctggcgactccggtggatgaagcctggaacggcccggcggcgctggacggcaaacgtatcgccacctcttacccgcacctgctgaagcgctacctcgatcaaaaaggtatctcctttaaatcctgtctgctgaacggctccgtggaagtggcgccgcgcgccggcctcgccgacgctatctgcgacctcgtctccaccggcgccactctggaagctaacggcctgcgcgaagtggaagtgatctaccgctccaaagcctgtctgatccagcgcgacggcgaaatggccgacgccaaacagcagctgattgaccgcctgctgacccgtattcagggcgtgattcaggcccgcgagtcgaaatacatcatgatgcacgccccgaccgaacgcctggaagaagtggtggccctgctgccgggcgccgagcggccgactattctgccgctggcaggcgacaagcagcgcgtggcgatgcacatggtcagcagcgaaaccctgttctgggagaccatggaaaaactgaaggcgctgggcgccagctccattctggtgctgccgattgagaaaatgatggagtaatcggccagccggtcacgggacacacaggggaatacaatcatgagcttcaacacaatcatcgactggaacggctgtagcgcagaccaacaacagcaactcttaacgcgcccggcgatttccgcctccgacagcatcagtaaaacggtgacggagatcctgaataacgtcaaagccaacggcgacgcggcgctgcgcgaatacagcgcgaagtttgataaaaccaccgtcgccgcgctgcaggtgagcgaggcggagatcgccgccgccggcgagcgcctcagcgatgagctgaagcaggcgatggcggtggcggtgaaaaacatcgagaccttccacaacgcgcaacagctgcaggcggtggatgtcgaaacgctgccgggggtgcgctgccagcaggtcacccgccctatcgcctccgtcggactgtacattcccggcggctcagcgccgctgttctccacggtgctgatgctggcgacgccggcgcgcatcgccggctgtcagcaggtggtgctctgctcgccgccgccgattgccgatgagatcctctatgccgcgcagctgtgcggcgtaaaaaccatctttaacgtcggcggcgcccaggccatcgccgccctcgccctcggtaccgagtcggtgccgaaggtagataaaatctttggcccgggcaacgcttacgtcacggaagccaaacgccaggtcagccagcgtctggacggcgcagccatcgacatgccggccggcccgtcggaagtgctggtgatcgccgacagcggcgccaacccggactttgtcgcgtctgacctgctgtcgcaggcggaacacggcccggactcgcaggtgatcctcctgaccccggacgccgacatgggcagccgcgtcgccgaagccgtggagcgccagctggccgcccttccgcgcgccgaaactgcccgcgtggcgctctccgccagccggatcatcgtggcccgcgatctggcgcagtgcgtggctatttccaacctgtacggcccggagcacctgatcattcagacccgtcaggcccgcgagctggtggatagcatcaccagcgccggttccgttttccttggcgactggtcaccggaatccgcgggcgactacgcctcgggcaccaaccacgtcctgccgacctatggttacaccgccacctgctcaagcctcggcctggccgacttccagaagcggatgaccgtgcaggagctgtcgcgcgacggctttgccgccctcgcctcaacgattgagatcctggccgccgccgagcgccttgacgcccacaaaaacgccgtaacgctgcgcgttgccgccctgaaggagcaagcatgagcattgaagatttagcccgcgccaacgtccgcgcgctgaccccgtatcaatccgctcgccggctgggcggcaaaggcgacgtctggctcaacgccaacgaattccctaccgccgtagccttccagcttaccgaacagacgctgaaccgctatccggagccgcagccgaaggccgtgattgagagctacgcccgctacgccgaggtcaaaccggagcaggtgctggtcagccgcggcgccgacgaaggcatcgagctgctgatccgcgccttctgtgagcccggcgaagacgcggtgctctactgcccgccgacctacggcatgtacagcgtcagcgccgaaaccatcggcgtcgagtgccgcaccgtgccgacgctggccgactggcagctcgacctgccgggcatcgaggcgcggctggacggcgtgaaggtggtcttcgtctgcagcccgaacaacccgaccgggcagattatcgacccgcagtcgatgcgcgacctgctggagatgacccgcaacaaagccatcgtggtggccgacgaagcctatattgaattctgcccgcaggcgacgctctccggctggctcagcgactatccacacctggtggtgctgcgcacgctgtccaaagccttcgccctcgccggcctgcgctgcggcttcaccctcgccaacgccgaggtgatcaacgtgctgctgaaagtgatcgccccgtacccgctctccacgccggtggccgatatcgccgcccaggccctgagcccggaggggatcgccgcgatgcgccagcgcgtggcgcagatccttgacgagcgccgctacctggtggaacagctgcgcggcatcgcctgcgtggagcaggtcttcgattccgagaccaactatgtgctggcgcggataaccgcctccagcgcagtgtttaaatctttgtgggatcagggcattatcttacgtgaccagaataaacaaccttcattaagcggctgtttgcgtatcactatcggtacccgtgccgagagccagcgcgtgattgacgctttgactgcggagaatgtatgacccagaagtatctctttattgaccgtgacggcaccctgatttccgaaccgccggaggatttccaggtggaccggttcgacaagctggcgtttgagccgcaggtgatcccggcgctgctgaagctgcagcaggaaggctataagctggtgatgatcaccaatcaggatggcctgggaaccgacagtctgccgcaggaagcgtttgatggcccgcacaacctgatgatgcagatcttcgcctcgcagggcgttaactttgaagaggtgctgatttgtccgcacttcccgggcgacaactgcgcctgccgcaagccaaaaacgcagctggtgctgccgtggctggaagagggcgtgctggataaatcccacagctatgtgattggcgaccgggccaccgaccttgagctggcggataacatgggaattaccggtctgcgctatgaccgcgagacgctcgactggccgaccatctgcgagcagctgacccgccgcgaccgctatgcccacgtcgagcgcatcaccaaagagacccaggtggatgtgaaagtgtggctggaccgcgaaggcggcagcaagatccacaccggcgtcggcttttttgaccatatgctcgaccaaatcgccacccacggcggcttccgcatggaggttaacgtcggcggcgatctgtacatcgacgatcaccacacggtggaagataccggcctggccctcggcgaagccctgaagctggcccttggcgacaagcgcggcatcaatcgcttcggcttcgtgctgccgatggacgagtgtcttgcccgctgcgcgctggatatctccggccgtccgcacctggagtataaggcggacttcacctatcagcgcgtcggcgatctgagcaccgagatggtggaacacttcttccgctcgctctcctacaccatggcggtgaccctgcacctgaaaaccaagggcaagaacgatcaccaccgcgtggagagcctgttcaaagcctttggccgtacgctgcgccaggcgatccgcgtccagggcgatgccctgccgtcttccaaaggggtgctgtaatgaatgtggtgatccttgataccggctgcgccaacctcaattcggtgaaatcggcgattggccgccacggctatgagccggtggtcagccgcgatccggaagtggtattgcgtgccgataaactgtttcttcccggcgtcggcaccgcccaggcggcgatggatcagctgcgcgaccgggagctgatcgacctgatcaaagcctgtacccagccggtgctggggatttgcctgggcatgcagctgctcggcaagcgcagcgaggagaacaacggcgtcgatctgctgggcattatcgaagaagaggtgccgaagatgaccgaccacggtctgccgctgccgcacatgggctggaaccgggtgtatgccaaagctggcgatcggctgttccgcggcattgaagaaggcgcgtatttctacttcgtgcacagctacgccatgccggtcaacccgtacaccatcgcccagtgcaattacggcgaggcgttcaccgccgcggtgcagaaagataacttctttggcgtgcagtttcacccggagcgctccgggagcgccggggcgcagctgctgaaaaacttcctggagatgtgatgattattcctgctttagatttaatcgacggcaccgtcgttcgtctccatcaaggcgattacggccagcagcgcgactatggcagcgatccgctgccgcgcctgcaggcctatgccgctcagggagcggaagtcctgcacctggtcgatctgaccggggcgaaggatccggcgaaacgccaaatcccgctgctgaaatcgctggtcgccggggttgacgtcccggtacaggttggcggcggtgtgcggaccgaagcggatgtcgcggccctgcttgaggccggcgtcgcccgcgtggtggtcggctccaccgcggtgaaatccccggaggaagtgaaaggctggttcaaacgctttggcccagaacggctggtgctcgccctcgacgtgcgtatcgacgccgacggcaataagcaggtggcggtcagcggctggcaggaaaactccggcgtgacgctggaggagctggtggaaagttatctgccggtcggcctgcagcacgtgctgtgcaccgatatctcccgcgacggcaccctggcaggctctaacgtctcgctgtacgaggaagtctgcgcccgctacccgcaggtggcgtttcagtcatccggcggcatcggcgatctcaatgatattgccgccctgcgcggcaccggggtgcgcggcgtgattgtcggtcgcgcgctgctggaaggtaaattcaacgtaacggaggccattcaatgctggcaaaacggataatcccctgcctcgacgtccgcgacggccaggtagtgaaaggcgtacagttccgtaatcacgagatcattggcgacatcgtcccgctggccaagcgctatgccgacgaaggtgccgacgaactggtgttctatgatatcaccgcctccagcgacggtcgggtggtcgacaagagctgggtgtcgcgggtagcggaagtgattgatattcctttctgcgtggcgggcgggatcaagtcgcaggaagacgcggcgcagatcctctccttcggcgccgataagatctcgattaactcccctgctctcgccgacccgacgctgatcacccgccttgccgaccgctttggcgtgcagtgtatcgtggtgggtatcgatacctggtttgacgccgagagcggtaagtatcacgtcaatcaatataccggcgatgagagtcgtacccgggtaacgcagtgggagacgctcgattgggtgcaggaagtgcaaaagcgcggagccggcgagatcgttctcaatatgatgaaccaggacggggtgcgcaacggttacgacctgcagcagctggcgaaggttcgcgcggtgtgccacgtcccgctgatcgcctccggcggcgcgggcactatggaacacttcctcgaagccttccgcgacgccgacgttgacggcgcgctggcggcctcggtattccacaaacagattattaatattggcgaactgaaagcgtacctggcggcacagggcgtggagataagggtatgttgactgaacagctggactgggaaaaaacggacggcatgatgccggccatcgtgcagcacgccgtatccggcgaagtgctgatgcacggctacatgaacaaggaggcgctggagaaaaccgaaaagaccggcaaagtcaccttttattcacgcaccaagcagcggctgtggaccaagggtgaaacctcgggccatgtcctcaacgtggtgagcatcacgccggactgtgacaacgatacgctgctggtgctggtaaacccgatcgggccgacctgccacaaaggcaccaccagctgcttcggcgaaaccggccaccagtggctcttcctctatcagctggagcagctgctggccgagcgtaagcacgccgacccggagagctcctatacggcgaagctgtatgccagcggcaccaagcgtattgcgcagaaagtgggagaagaaggcgtggagaccgcgctggccgccacggtgaacgaccgcttcgaactgaagaatgaggcgtcggacctgatgtatcacctgctggtgctgctgcaggaccaggggctggatcttggggaagtgattgataatctgaagagtcgacactaacgcgttgacccccgccgcaacggcgggggtagctggcctcaggatttgctttccagcagcgtagtgtagagattgacgtaagcgtcaatcatatggtcggctgtaaacatctcttcaaaacgacgacgcgagttttcgccatagcggctggcggtttcatcgttatgccagagctcattcatcgcctccaccagcgcctgactgtcattcggcgggatcacgcagccatttactttgtcctggttaatgaacgaggtaccggtgccgatctcgcaggagatcagcggcctggcaaagcgcgcgccttccagtaacgtaatgccaaacgcctctgagcgtagatgcgaggggaagaccacgccccggcagagctggaagagaatgtatttatcttcgtcgttgagcatgccggtaaacaccacattgctcagcccgcgctgctgcgcctcacgccgcacctccgcctccagcggcccgcccccgacgatcaccaccggcagccggctacgctcggcggcatccagcagaatgtgcagccctttgtagtagcggaaagcgccgacgaagaggaagaagttatcgccgacggtttcccgccagtgcgccacccgctgcggatcgtgctgcacgtcatgctgctccagaccaaacgggatcaccaccgttttatcctgatattttttcagggtctggctggaggccacgtagttgggcgacgaggcaacaatgcagtctacgctggcgaggaatcgctcctgcagcggctggtacaatttcatcaaccgtttttgtttcacaatgtccgagtgataggtcaccaccgttctggcgtcaggccgcgccgagagatgcagcatatccataaagggaaacggaaaatggtagttgatgatgtcgtaatcatctttaatctgcttaaaacgctttaacgctttcaacgaaaacggcgtggaggcaatttcaaaaagctgcttattataaatgacccgatggtcttcgtaggcgacaggacctgtctctttgtccgggctaaaagtaaaaacatcggctgcgatcccccggcgggcgcagccctgactgagctgataaatgacctgctcaataccgccgtaggtatcgggatagtaggtcttatagacgtgtagaactctcaactgacacccttagagtaatttataggcgttaatggtctgggtcgtacagttctcccacgaaaactgtttcgcctgggcaagaccgcgcgcggtggcgatttcccgccagctatcatcctgcaggctctgcaaaatatgcgcgctaatcgcgtctacatcattaggatcggcaacgaggccggcatcgccaaccacttcaggcaaagaagtgacattggaacatactaccggcacaccgcaagacatcgcttcaagaataggtaaaccgaatccctcatagaaggagggataaacaaaggttctggccgccgcgtacagataaggcaggtcctcatccgggacatagcccaggtaacgaatccacccttcacgcgtaccgcgctcgactaactgccacagcacatcgtcttcccagccgcgatagccgctgaggatcagcgggtagcgcatgcgggtctccatcggcagcagctgataggcctgcagcagaccgcggatatttttacgcggctccatggtgccgatatataacgcatacccctgccacgccagctgatatttctgcaggaccggcaggcactccgccgggctgcgaggaatatagtcgctgctgcaggccagcttggtggtgacgatccgctccaccggatagttgaacaggcggatgatttcactgcgcgagaagtcagagacggtcaggatcagctttgccgaatccaggctctcatgcagggacttctccatatagcgaacccgatcttttggatgatattccgggcaggtaaaaatggagatgtcatgaaacgtggtcaccgcgcgttccaggcgatgcggcaggtaaaaattgggaccatggtagatataatctttatagtcgcgcaatgcccacgcctggcgccgcgggtgcagcaggcgatacgcctcaatcagcagcggctggcggcgcagaaacgccgacaaacgaccatgattgctggctttggtatcgctcttattctccacctgggggatctgatcgataaacgacgcgccgtgaaacagctttagctcttcgatttcgcgggcgaccgccagccgcttaaccagctccagggaataccgaccgatgcccgttaacgggtatttaattggctcagtagcaaaaataattttcataacgaactcatcacaagggccaccggggtagccctgttgatagcgattattgcttcgcggctggcgcgataatcggcaggtttttcaggagaaattccgcgctctgtttccaggttaaccagttgatattttcggaacgaggatgcgcgttttgctcgtacagggctaaccagtcttctaccgctttcgcgatatcggacggcgcttcaccggagaaataccacgcatgttcctgagcaatctctttaaacaccggaatgtcgcgaataatcactggcagctttttctgcgccgcttcaatcaacggcaggccaaagccttctccgagagatgcgaagattaacgcactagactgagaatacaacttcgtaaggaactcatcgctaatgttttgtagccaaaatagttttttatttagctgtggatggtgacgtaaacgttcacataaatcatcaacatgccacccctgtttaccaatgataaacagattgtagttcttgccctgtaaccacaattcttcaaatgccgctagcgtctgcgcatgtcctttgcgtggttccatcgtgcccaccatgataaatgatggagccgcggccatcgctgctaacagcgcctgggcattatccggcatgccagtggacggtacgctggcatcgaggtcggctcccagatggaagttgctgacggtcagcagcgggttcggtttcacccaatggctgttttccgcaatccaggcttttacatcctctgcaacgcttgctgatacacaaatcaagcggtcagcgtgctgcgcaatgcaagataaccaaatggggaacacgcgttgcattccctcatcgctccactccggtcttctcagaggcagaatgtcatgcacaacaaaacaaaccttggcaccggatagacgaataaaatccagctggacagtaagctcaggaaacagatgggcagttagatcggtagcaaccagaatatcatctttggtaaacagtacaggtacatcaggcccgaacgccccgttaaaatgggtattcaggtattcgttggcatagcgatagcattcacccggtcgataataaaccgcactgacagtataaccagcaacgccagatttcagtaattcactaagtatactgcgagaaacccgttgaattcccgttttcgcatcatgctcaacaagaacagaaatatcaaccagcagcttgcgctgatgtgtagcaaagctattacgagcaatcgcccaggctgtctgtaagcgttcggtttcacttaattctgcaatatttttaattctattaatggtgtgtgcggtgaagcttgtgatatccagaggttctgatgcggaagccttatctacaagcctctcaaatccctttaacgcgagctgcgcggtgtgatcccatgtgaactttgccgcctgcgccggagcatgagcttttaatgctgagtagaactcactgtcagtcaaggccctttgcataacacggcaaatgtcggggacatccagaggattaaataaagcctcttccataccaatgacctcgggtaagctggtcacatttgaacccagcgtagctgcaccacaacgcatagcttctagtggcggcaggccaaacccttcatgtatagaggggaaaacgaaaattttgcacaaattgtaaagtgcgataaggtcactatcgtttaagaagcctgtaaaaataagctgattacgagataaaccatagttctctgcaactcggtacagcctttccttttcatcggtgctaattttataggccaaaactaagggataactctgttgcagggcatgcggtaataaactatatgcatgaatcagcgcttcaatatttttacgtggctctatcattgccaaagaaagaataaactcttgaggaagatgatatttattacgtaagtctttgatttcatcgtgagtataatctttaattttaaatgaatcgcttactccagatgaaatattaataattttttctgccggaatcgatgtgtaatcgataacttcctgcatggatgatctggaaatagcaaaaatagcgtccgccctttcgtattgagctagtttatcataataatactgacggaagtttggttcgcccagatagcgttctttattcagtaacggaattagatcgtgacaaacacaaactgttttccatggtactgtagtttgaggaattgagacggtataactatcgtcaaaaccttcgtagaaattaataataaaaacaacgtcgggattgatattagcaatagcaagttcacgagctagtgtggcggcaacactccggggatggttttcacagtcgcgaagagctgtagggccagcagctgaaaaaataaacatttcttcctgcggtaatatatcaccccagctttttttaatttcatttatactatcaatcgaatacatgccattcattaaaatgcttactcgatgctggcccgcattttttatgatcgcacgactcatttcataggtgctgcgaccaactccacggaatttactttccgattgatatccttgtacgtcaatcaaaatatgcaagtgactcaccttatcttttgtttttaagctcgctaaaaattgagttaacttccggaggcaataactctggatgtaagatctgcttttcagtctgcgactggtattgtgggtcgtttggataagggttatgtgaaccaggattcatacgacgatgcatacgataagcaaagtcataaattccaattgtacgcagtagattgatcaccttctgctttagtcgtggatgtgcacgcaaaaaataaaatacgttgctaagcactcgtttgagtaaatgcttaaaacgctgtttgaagccgtactgacgaagcagatagtactgtaagccagcgtaccgataccacttggtcattttccatgagcgactataatgaattttagcaatctcatgacgtagattctctatttcttgctgagcatcattgagctgcgtatgaagtcgcataatctcttctgaatcaacggctttactctgctcaatctcgatacgcggctgtacattagtagtaacgtcttgtggcggatactcacgcttctcaaacgtctgaatgctctcacccataatattaatcagggaggtgagttcattgatttgcgactcgagacggactacccgcgcatccgtattgcgtatttgcgtttgactttccaacaatacgggctcctgagcccggacccatagatcagaagcgtccataatggaactcgcagccggtagagcatctttggttgaaaagagttgttggagtaaagcaaaactccactcaccaacaggatgtttccagaatgctgtcaaccaatttgaatacggttcaggcaactggaaaggacttaatggtgcggaacgccagaagcccctccaggatttattttcacaaaatatttcatttacaaaaataatgaacgactggaaaatattaactggccagctgcagtcttgttgtacatcgccaatcgaaccaaaatctattaaacgagcgctgtcattatcgtcaattaaaacattccatgttctgaaatcatcatgatatagaccatgttcttccaaaataactaattggtcgaggagatcggaaataactttttcccgatcaatatgccgttcactggccagaacgtcgtttaacaactctccgggaattttttccattaccaaccatcccgcttctccattcccccctgcagtaaacaacgccggcacttttaagccagatggtggagatttaagaaaagcttcttcatgggcgagttcagtacgattacgctcgctctccttatcagttagtaagcaacttactgtactaaaacgatagaacttacatatgaactccgaagagaaataatagcgacggctctgtttatgcgcaaagcctgctccggtgtaaggactgtcgcgccatgaagtaaaaggctgattaaattccggaagaataaccctgtggttactgataatatacatcggacgtgaaatattagacagatgagtgtcaaatcttccaatcaatcgatagaaagcacattggtcaataagttcacgcggatcttcaggctgagatttcccccaatagagtggttcctccttgacagcgagctcgagaatcatcgcctgcgtcagatttgccaaacgctctaacagcgatctgacttcagcaaccccatgcagatgaacaatgtggtgaaaaacacttagtccaatggcgagatcaaattggttttcttccagagtgctgacaatgtcttctatccgcccgacttgaaatttgacatcacaatgtggattttcttcagcaagcgcctgacaaacatcaatgttctgctgcaaaaagtcgatacctaatacgctggcacccttgcttgccaaacttaaactgaagaacccctgagcacagcccaggtcgagaacccgtagtggccttcctaactctctggacaagctgtcatattgttcactaattagcgcgagccgttcattacagtctcgtgcagcatcgccatcccactcaggatgcccaaaaatagtctgataaatttcaggtaattcgctaaccaatttatgtgtattagtagtcatggaatgattttttctcatcttcattggtaactattgaaagtcgacttcaggtcaatcactccccagaaatccatgctcttagttacatgcaaaatgatggagtcatagcgacgatcgagcggcgtcatttcggtttgcgggcttccctctgaaataccaaacgacagaagatagtcaccgctatttaaatcaaccggaaaactgaatttaaatactctaacgtccccacgtgataccgaaatgttttcccggccttccgaggccaggaaagagttggtaccatatagaaataagccatccagagttttgattaacaaacccggtaccacgcaatcaaagtcatattcaaatacgactttcatcaggaaatcggtctgctgattgcccgtcagtgaaggcggaaaatcaaccccggcgctctggatatgataatcaatgatttttgcacccccctgcccccaacggtactcttccggacggtagcctgggcgcgtgtggtatacatcttcaatctcatcgagagacatctgactttcgccgctggctgacgaggttgccgttgcgctttttggcgcgctgtttttgtcggctttgccaaacagctcatccagataacggttggtcacgtcacgggcggtgccgtccatacagatatcaccatttttgaggaaaatggcgcggtcgcagtgtttgacgatatccccggcgctgtgggagaccagcagcagcgtggtgccctgctttttaaagtccgcaatacgggcgtagcacttcgcctgaaaacgggagtcaccaacggaaagcgcttcatcgacgatcagaatatccgggcgtgaggccgtggccacggcgaacgccaggcgcatttgcatcccgctggagtagatgcgcacgggctcttcaatgtagtcgccgatatccgcaaaggcttcgatctctggcattaagcgctcaatctcttcccggctcaggcccatcatcagcccggacatatacacgttctgccgaccggtaaagtcaggatggaagcccatgcccagctccagcagcgcagcgacacgcccctggatctcaatgctgcctttggtcggctgagtggtgccggtcagcagcttcagtaacgtacttttacctgcgccgttcaccccaacaatgccgaccgcttcaccgggttcaatactgaaattgatatctttcaatacccatttcttgctgtgccgcggcttatcgcccggcagaagtttctcaatgacccggttccatttggatggataatatttatacgccttgccgacgtgctgaactttgatactcatgattaaatctcgtccacaatatcagcggcatgttttttaaataaacgccaggcaaataaaaacagaatgacggacagcaccgtgaccggaagcagcgccagccagttagggctctggtgatagagcatcacgttctggtatgaaccgataatggtcgccatcgggttatacgccagcagaccagagacccactccggcagcgttttggacacgtagacaatgggcgtaaaccagaaccaaaactgcagcaggatattcacgaactgcccgacgtcgcggacaaaaacgttcagcaccccgaggatgatcccgaggccgagggtgaacagcatctgaacgatcagcaccggaatgatttcaaagaaaatcatgcccgggaaattgcccgtaacgatcagaaacagcacgaacagaccaaaaatgatcaggaagttaatgaacgccgaagcggtgacgatgattggtaaacagatccgcggaaagctaagctttttaagaatgttggcgttggtcagaaaaacgttgaccagactattgagcgtttccgtaaacagcccccaggttaacaccccggaacagaggtagatactgtaggcaaaagggccgtccatgcccgccaggcgggcacgcattaactcagaaaagattaatgtatagacggaaatcatggcgatcggctgtaagattagccatgccgcgcctaagaagctagtctggtaacgggactgaaagtcccgtttgacgctgtcaataataaagccacggtagcgatagatcgctgaaaacataggactcaaagcgattcctcttttaacaggttgagcagctcggcggttttctcattcattaacgcagtatccgctctggactccacgttcagacgcaccaccggctcggtattggacgtgcgcaggttaaaacgccactcagggtattcaatactgataccgtccgttgtgtcgatgtgtgcggccgccggctcatactgcgcccggatgcgcgctatcgcctccgccgcattccccagcttgcggttgatctcccccgacgccgggaacgccgcctggcggtccgccaccagcgatttcagcgaactgttcttcaggcacagcagctccgccaccagcagccacgggatcatcccgctgtcgcagtaggcgaagtcgcggaagtaatggtgcgcgctcatctccccgccgtagatggcgtcttcctggcgcatccgctccttgatgaacgcatgccccgtcttcgacatcaccggctggccgccgctgcgggtcacgatgtccaccgtgttccacgtcagacgcgggtcgtgaatgattttcgcccccggctgcttctgcaggaacgcctccgccagcaggccgacaatgtagtacccctcgataaacgacgcctcgtcatcgaacaggaaacagcggtcgaagtcgccgtcaaaggcgatccccatgtccgcctgatgcgtacgcaccgcgtcggcggtgtcctggcggcactccggcagcagcgggttcgggataccgttcgggaaatggccgtccggctggtgatgcaccttgataaaggtcaccggcgccccggccgccgcgaagcgtttctccacttcatcaatcacgtgccccgccgccccgttgccggagttcaccaccagcttcagcggacgggtaaagttcgccaggtccacatagcccatcaggtggtcgacgtactccttcagcaccgatatctgacgcagggtcccgcgacgcgccgggtccaccggcggaaactggttctcctccgccaggcgctggatatcccgcaggccggtgtcgccgctgatgggcttcgcgttctcgcgcaccagcttcatgccgttgtagttcatcgggttatggctcgccgtcacctcgatgccgccgtccaccccgaggtggaaagtggcgaagtaaatctcttccgtgccgctcaggccgatatccagcacgtcggtgccggcgtccatcagcccgcgggccagcgccagcttcagcgactcgctggtgaggcgcacatcgccccccaccactatcttcccgggtttcagaaattcgccgtaggcgcggccgatacggtaggcgatgtcctcgttcagctcctcgcccagttcaccacggatgtcataagccttaaagcatgttaactgtgtcattctgcgttttgtcccgaaaaaattagcaacgaccatactggtctttaatacgaataatgtcgtcctcgccgaggtacgaccccgactggatctccagcacttccagcggaatgcggcccgggttttccaggctgtgctcggcgccaatcggaataaaagtggactggttctcggtcagcaggaactgcttgccgttgaccgtcacctggccggtgccggcgagaatgacccagtgctcggcgcggtggtggtgcatctgcatcgagaaggcgccgcccggtttcaccgtaatgcggttgacgttgaagcgcggggtctggaccaccacgtcgcagcggccccagggacggtaaatctcgcggtggcgcttgtactcgctgcgctggttctgcttgaggaactcgaccgccttcttcacgtcctgggaacgctcgcggttcatcaccagcacagcgtccttggtgctgacaatcaccaggttctccacgccgatagccgccaccagcttctcgtcgctgttgatgtagcagttttcgctgttgtgcacccacgcgtcgccgctgaggacgttaccctgctcatctttcgggctgacctcccacagggcggaccaggagccgacgtcgctccagtcggcatcgagaccgaccaccaccgcgtcggcggttttctccatcaccgcgtagtccacggactcgtccgggcactcacagaaaatgtcatgcgggatgctgatgaagtcgctgccgttatcggcggcattgaccgcggcctggcaggcttcgaggatatccgggcggaatttggccagctcggagaggtattttttggcgcggaacataaacatgccgctgttccagtaatactccccggaggcgaggtaggcctcggcgcgctcgcggtccggtttctccacgaaacgggccacctggtacggagtatgggcgctgtcggtgagggccacgccgcgctggatgtagccgtagccggtttccggggcattcggcacgataccgaaggtgaccagatggccttcatcggcatactgctcggcgacgcggatggcgtcgtggaagaccggctggttattgatgatatggtcggcggcgaggaccagcatcagcgggtcgtcgccgtggcgggtggcctggagggccgccagggcgatggccggggcggtgttgcgcccgaccggctcaagaataatgttgttcgacagcttgttgagctggcgcagctgttcggccaccaggaagcggtgctcttcgttacagatgaccatcggttcatggatttcaaggcccgagagtcgggtgatggtttcctgcagcatggagttctgcccgaacaggcggaggaactgtttcgggtaaagctcgcgagacatcggccagagacgactgccggtaccaccagccataattacaggaagtaacataatgaaatccttaaataaataattgctttattttactatcaatcaatcgaccgtctgggtggaacggcctttttcaggcacgctaccgccattggctgtcgcaaccaaaatgcgtactgctcccgtgctccaggctaaacgccacccgctttcgcttcaggctatcggcagatcgttcactcagcggcctgaaaagccagtctgacagaacggggggcctgaaaacctaaaagcagagatatgccttgagacatatctctgcttttaatatgcatctgttcctcacctggccgccaaacgcaccacactttcctcatttgccgccgaattaaccatcaggactttctcatttacgcagggtataacgtctgcgcttttcgccactgatgaaagagaaacgggcgacccgccgatgtgagccagcagcaaaagggagcgttcacgatgcggggaaagagaagaagagacatcgtcttcgccgccagggagacagcgcgcgttcaggcttgatggccctttgcacacggcggcggcgctatgttccgacaggtgggataaacgactcatgctctacaatgcacattccacaaagaaaatcgtccgcagattatagcgctggacgccgggaataaaaataaaaaagcctactgattaatggattactcaaataatacacatcttaaacattcattaaacaaacaaaacaacaataagtcaatgatataaaagacaaaacggaggaaagcatggcgcgatttttgcccatttactaaatgttccgctgacgaaaaatataactttaagcaaaattatgccgtcccggagggtattggctgcctttagggtatcgccacgaatcgctaaaccaccgaccggtcacaaggttattattcggaggctaacagtcaaatgagaaatgttgttatttatcagcctttgccaccgcagttttgccagaaaaaacgtccttcacctctcacctggcgggtaagacgcggcaaagcaagtgatcccaaccgcaagccagtgtaaaatcggcacttatgtagaacgggatatccacaccccggaggaaaaatatgaagtttttggtcactggtgccgcaggttttatcggcttccatatcgcgcagcgcctgctgaatgaagggcatgatgttgtcggaatcgacaacatgaacgactattatgacgtcagcctgaagcaggcccgtctggatcgcctggcatctccggcattccatttccagcagctggatctggccgaccgtgaaggtatggcaaagctgttcgccacagagcaatttgatcgcgtgatccacctggccgcccaggccggtgtgcgctactcgctggaaaacccgtatgcctacgcagacgctaacctgatggggtatctgaacattctggaaggctgccgtcataccaaggtgaaacacctggtgtacgcctcctccagctcggtttacggccttaaccgtaaaatgccgttctccaccgaagattccgtcgaccatccggtctccctgtatgccgccaccaagaaagccaatgagctgatggcgcatacctattcccatctgtacggcatcccgaccaccgggctgcgcttctttacggtttatggtccgtggggtcgcccggatatggcgctgttcaagttcacgaaagcgatgctggaaggaaaaagtatcgacgtttacaactacggcaaaatgaagcgcgacttcacctatatcgacgacatcgtcgaggcggtggttcgggtgcaggatgtgatcccgcaggccaatgccgactggaccgttgagagcggttccccggccaccagctccgcgccatacagggtatataacattggcaacagctcaccagtggaactgatggactacatcactgccctggaagaggcgctgggaatggaagcgcagaagaatatgatgccgatccagccgggagatgtgctggacaccagcgcagacacccaaccgctgtatgacctggtgggctttaagccgcaaacgtcagtgaaggacggcgtgaagaacttcgtggagtggtacaaggattactatcagatctaatccccctgccctgccgcaatcgtctgattgcggcaaccccttcaatgtaacctccgttatcctgactatatgtcgacggaatgcacattcattattttttatataatattttgtgctatagacgccatttttgcctttttactcgcccgcctgagaccagtttcatccagcctttttcagaaaagcaaatatccgcgcaccaggcactgaaacttttctggtatccagaccaatttggttagcggaaacagcattatatgctgattgataaaaaacattactatctgtaggaattttcctaaatccaggatatgttagagcaagccatgcaacagcacaaaactgatgtattgcttatcaagctaataattcaatcaacatacgccctgtggtagatattatggaaaacctatttttcttagtggtcgctgccatactacttgctgtttccgtttatttcttaatttcttatttaaaagacagaaagaaaacgaaactgacgtttaataaacgcaagtggtaaggcccgttccgtattacaattagattaagataatattaagagataaaaaaatgatatgacagaatgactattcattctgcgttttggcatggccttaaggcaagaaaaaaaataacgctactcgcgccctattccgcgttttttcataggacataaataacaaaagcctgcgttgcaggctttgttttacctcccggcgcttatctccggcatctacatcacagtgacggtagctcttcacaaggtaagtttaacttatcggacctgttttcaacccgcaacggcttttgcgcaggatcgtaatgtccatcacaatttattgaggttaatctgaatgtgcgagaaatacgcgtagtgagagatatagcggggagataaagaagaacactggcggcagggaaccgccagtgtcagacaggcagaattaatcgttaccaaacagatcgcgggtataaaccttatctgcgacatccgccagctcttccgccatacggttagagatgatcacatccgcctcttgtttgaaggcatccaggtcgcgcacgacgcgggagttgaagaactcatcttcctgcatcaccggttcatagataataaccggaatacctttcgccttgatgcgcttcataatgccctgaatagaagaggcacggaagttgtccgaaccactcttcatgatcaggcgatatacacccaccactttcggcttacgagcgagaatagaatccgcgataaagtctttacgggtacggttggcatcgacgatagccgcgatgatattgttcgggaccgattcgtagttcgccagcagctgcttggtatctttcggcagacagtagccgccgtagccaaaggacgggttgttataatggttgccgatacgcggatccaggcataccccttcgataatctgcttgctgttcagcccctggctttcagcatagctgtcaagctcgttgaaataggcaacgcgtagcgccagataggtgttagcgaacagtttgatcgcttccgcttcggtggagtcggtaaacagggttgggatatcctgcttgatcgcgccttctttcagcagatcagcaaaacgttcggcacgcgcagagcgctcaccgatgacaatacgcgacgggtgcaggttgtcgtacagcgcacggccttcacgcaggaactcaggagagaaaataacattatcaatccctaaacgttctttaatgtcgcgggtgaaccccaccgggatggtcgatttaatgatcattaccgcgttcgggttgatctctgtgacatcgcgaataaccgcttccaccgtagaggtgttgaagtagttagttttgggatcataatcggtcggcgtcgcaatgatcacgtagtcggcattacgataggcgtcgtgcttgtccgtggtggcacggaaatttaacggtttttctgccagatattcctgaatctctttatccacaatcggagagatcttctggttaagcatatccactttggcctgtacgatatccagggccaccacttcgtggttttgcgcaatcaggataccgttcgataaaccaacataacctgtaccggaaatagtaattttcattcgattacactttaatcagttaactgggtaatggcggatagccacgaattttaataatgctgtgggcggttttacgctttgacctgtgggatgtcaagaataagccataaggtcaaaaatacgattaaaatctgaccctatggcttccgttatggttaatgcattacttgaggagggctaaaatctcttcggtttttgcattcattaacgccgtatccgctctggactcaacgttcagacgcaccaccggctccgtgttggacgtgcgcaggttaaagcgccactcagggtattcaatactgataccgtccgttgtgtcgatgtgtgcggccgccggctcatactccgcccggatgcgtgctatcgcctccgccgcatttcccagcttgcggttgatctcccccgacgccgggaacgccgcctggcggtccgccaccagcgatttcagcgagctgttcttcaggcacagcagctccgccaccagcagccacgggatcatcccgctgtcgcagtaggcgaagtcgcggaagtaatggtgcgcgctcatctccccgccgtagatggcgtcttcctggcgcatccgctccttgatgaacgcatgccccgtcttcgacatcaccggctggccgccgctgcgggtcacgatgtccaccgtgttccacgtcagacgcgggtcgtgaatgattttcgcccccggctgtttctgcaggaacgcctccgccagcaggccgacaatgtagtacccctcgataaacgacgcctcgtcatcgaacaggaagcagcggtcgaagtcgccgtcaaaggcgatccccatgtctgcctgatgcgcacgcaccgcgtcggcggtgtcctggcggcactccggcagcagcgggttcgggataccgttcgggaaatggccgtccggctggtgatgcaccttgataaaggtcaccggcgccccggccgccgcgaagcgtttctccacttcatcaatcacgtgccccgccgccccgttgccggagttcaccaccagcttcagcggacgggtaaagttcgccaggtccacatagcccatcaggtggtcgacgtactccttcagcaccgatatctgacgcagggtcccgcgacgcgccgggtccaccggcggaaactggttctcctccgccaggcgctggatatcccgcaggccggtgtcgccgctgatgggcttcgcgttctcgcgcaccagcttcatgccgttgtagttcatcgggttatggctcgccgtcacctcgataccgccgtccaccccgaggtggaaagtggcgaagtaaatctcttccgtgccgctcaggccgatatccagcacgtcggtgccggcgtccatcagcccgcgggccagcgccagcttcagcgactcgctggtgaggcgcacatcgccccccaccactatcttcccgggtttcagaaattcgccgtaggcgcggccgatacggtaggcgatgtcctcgttcagctcctcgcccagttcaccacggatgtcataagccttaaagcatgttaactgtgtcattctgcgttttgtcccgaaaaaattagcaacgaccatactggtctttaatacgaataatgtcgtcctcgccgaggtacgaccccgactggatctccagcacttccagcggaatgcggcccgggttttccaggctgtgctcggcgccaatcggaataaaagtggactggttctcggtcagcaggaactgcttgccgttgaccgtcacctggccggtgccggcgagaatgacccagtgctcggcgcggtggtggtgcatctgcatcgagaaggcgccgcccggtttcaccgtaatgcggttgacgttgaagcgcggggtctggaccaccacgtcgcagcggccccagggacggtaaatctcgcggtggcgcttgtactcgctgcgctggttctgcttgaggaactcgaccgccttcttcacgtcctgggaacgctcgcggttcatcaccagcacagcgtccttggtgctgacaatcaccaggttctccacgccgatagccgccaccagcttctcgtcgctgttgatgtagcagttttcgctgttgtgcacccacgcgtcgccgctgaggacgttaccctgctcatctttcgggctgacctcccacagggcggaccaggagccgacgtcgctccagtcggcatcgagaccgaccaccaccgcgtcggcggttttctccatcaccgcgtagtccacggactcgtccgggcactcacagaaaatgtcatgcgggatgctgatgaagtcgctgccgttatcggcggcattgaccgcggcctggcaggcttcgaggatatccgggcggaatttggccagctcggagaggtattttttggcgcggaacataaacatgccgctgttccagtaatactccccggaggcgaggtaggcctcggcgcgctcgcggtccggtttctccacgaaacgggccacctggtacggagtatgggcgctgtcggtgagggccacgccgcgctggatgtagccgtagccggtttccggggcattcggcacgataccgaaggtgaccagatggccttcatcggcatactgctcggcgacgcggatggcgtcgtggaagaccggctggttattgatgatatggtcggcggcgaggaccagcatcagcgggtcgtcgccgtggcgggtggcctggagggccgccagggcgatggccggggcggtgttgcgcccgaccggctcaagaataatgttgctggacagcttgttgagctggcgcaactgttcggccaccaggaagcggtgctcttcgttacagatgaccatcggttcatggatttcaaggcccgagagtcgggtgatggtttcctgcagcatggagttctgcccgaacaggcggaggaactgtttcgggtaaagctcgcgagacatcggccagagacgactgccggtaccgccagccattatcacaggaagtaacatattaatttcctttaattaaaaccctgttatttaacacccagtaatttactgaggccagaagtagattaatataggcgtacaagataataaatatggcaaattcttaaaaagattaaaattagatattagaaatatttttagaaaggtaatgcttaaggtcaggttgcaacattaaatataaaattaaaaacagtcaggccaaatggcctgactgtttgaataaatttattccagccactcggtatggaatacaccttctttatcggtacgtttataggtatgcgcaccaaagtaatcacgctgagcctggatcaggttagctggcagaactgcggaacgataactatcgtagtaggcaatcgcggcagagaacgtcggtaccggaataccattctgcacggcataagccaccacatcacgcagcgcttgctgatagtcatcagcgatctgtttgaagtacggcgccagcaggaggttagcaatgccagcgttttgcgcataagcatcagtgatcttctgcaggaactgcgcacgaatgatgcagccagcgcggaaaatcttagcgatctcgccgtagttcagatcccagttgtattcatcagaagcagctcgcagctgggagaagccctgagcataggagacgattttaccgaggtacaacgcgcgacgaactttttcgataaattccgctttatcgccggccggttgagcctgcggaccactcagcactttcgaagcagctacacgctggtctttaagcgaagagatgtaacgagcaaatacagactcggtgatcagagacagaggttcgccgagatccagtgagctctggctggtccacttaccggtacctttgtttgctgcttcatcaagaatgacatcaacgaggtacttaccttcttcatccttcttggtgaagatatctttggtaatgtcgatcaggtagctgcttaactcaccttcgttccattcggtgaaggtttgcgccagctcttcgttggaaagtgccagaccgcctttcaaaagcgcataagcttcagcaatcagctgcatgtcaccatactcgatgccgttatgaaccatcttcacataatggccagcaccgtcagcaccgatataggtgacacatggctcaccgtcttcagcaaccgcagcaatctgcttcagaatcggagcaactaactcataggcttctttctgcccaccaggcatgatggaaggccctttcagagccccctcttcaccaccggaaacaccggtaccgataaagttaaaaccttcggcagacagctcacggttacgacggatggtgtcctggaagaaggtattgccgccatcaatgatgatgtcgcctttgtcgaggtaaggcttcagggaatcgatggcgctgtcggtgccagctccagccttcaccatcaacaggatacgacgtggtgtttcgagggattcaacaaactcttgtactgtgtagtaaggaaccagcttcttgcctggattttcggcaatcacttcttcggtcttttcacgggagcggttaaaaacggagacggtataaccacggctttcgatgttcagcgcaaggttacgccccatcacagccataccgacaaccccgatctgttgcttggacattacatactcctgtcaggtgtgctctatgcgaaattctcgcagggtaaagtacatataatattaacgtaaggtcaacgtatggcaaaggacatctttagatgtttagtgcttttaaaatttttggtctgaaattcaccaaaaggggtaaagcacgagatcaaaaaacttgacaatataaatcaagcatataaagcataaagcttgtggaaaccatttatataaatatgatttaaaactcacatctacaataggttttataaaacaaggaaaaacaaaaaaactaatcaataactgagaaagtgaaagacttaacgaaacataccataactgaggaataaaaaaaacagtagtagtaacacccaaaacaatcgaagttgctataacattccatctgaactcaatgttagtcttgccatttgcttgagccacagcgcctgttaacccacccataggtcttaaaacaccaaacaaaagcatatatggtagaatattaaaaacccccatgcgacttgaaccatataaaattttgattataactggccccaacaaataaatagagaaaaaagttatcatgctaaacaacagaattacagatgttccacgcagatatgcaccaccaagtttatcagattgattttgaacctctgcaaatctgggcaaagccaatctatttattacgggactaatcagctttagaggttgcatgatgagatctttagctaaagaatataacccaagtgaatccgcacctagcattttaccaattmcaataacatctaattgtgtgcgaaattgatttagaatctgtgagcctaattgaaagatcccatatttaaaaaccggcttacatatagcagaattaaactcaaaagtaggtcgccaagatttatcacctaataatgacattaaaaaaagacgagcaaaagaattaataatcagaccataaatcacagcctcagttctcagttccatctttaaaattgagaacaaaacgaataaaaaagaaataattttagaaatgatttctattttagccaaaagtataactttttttgcttttatgtagtgcgattgatattgcgatagagatcctagaaaaagaaaattaaagcttgccaacattactaaaaaagttaagtcaggcatattgtaaaaagttgctataggccaagacgcaacgaaaacaaggcaccctgtcaggaaactaagtaacaggttgatccaataaatagtactctgatctcttcttgtcatttcttgcatatgaactatataactgctcattcccatatcctgcaagatcatcgcaaccatcaataccatattgactatagctagtactcctaactcacttagtttaagatggtgagctagcaaactaatttgtagaatctgaagaatggcagaaattgtattggatcctaataaccaaattgcttgttttttaatgccactcatttaatgctctccagcaaagtgacgattttgttgaactcaacctcctcgttaaactgagaataaatcttatcacgcgcttcagaagcaattaatgatagattatcttttccttcatatatttcatataaaatttttgctatagctnnnnnnnnnnnnnnnnnnnnnnnnnnnnnnnnnnnnnnnnnnncaattaactccggtataccactatgataagtggaaataactggtaagcctgacgccattgcttccataagtgcaacaggtattccttccatatcaccattactagcagttacggatggaagcaaaaagacattgctctcagcaagagctgtttttactactgattgtggctgaaatcctaaaagatagacataatcctgaagtcctagtgctttaattttttcggctagcacattctctaattctccataaccaattattttatatttaaatttgcatcctttattcttaagcgcattacaagcatcaatagcatataccagcccttttttttcagttaatctgcagacggaaataatgtttaaagttgattgatcacgtgcatgaaattcatatttaaattcgtctattttaattcnnnnnnnnnnnnnnnnnnnnnnnnnnnnnnnnnnnnnnnnnnnnnnnnnnnnnnnnnnnnnnnnnnnnnnnnnnnnnnnnnnnnnnnnnnnnngagaaaataaatttttatataaaatcttatattttttaagaaggctaattgtagaaatatcatacccatggaatacagtcaaaagcttaccattaattaacccgatatccctgattgcgttagcaagcacaccacaatgaccaaagtgagcaattataacatccgttgaaattttattattccttaactttgcaaaaatcgcaggtaataataatgagtaggataaaaatttaaatctctcaaagttgaatgctttaataatactaaatgaacttgattttaaaacaatttttgctctcgagaagataagggataatttattacccggtatttcatcagcgtcaaaaatattttctataagagcacctatgttgtatttttcaaaatcgccatgtactttttcagtatctcccggatataaagacaatacttttacatcataaccctttttaataaaggaaataacttgatttaaaacaaaagtttcagaagcgagtgggaatcgaatacaaaaaaaaagtattttcattatctatcaatctcagaaagaatgttttcaatcattgtgcgcccaattatttttgcatcttgtaagttattttttaaggaattttcaatatcagccatattagcaattaaannnnnnnnnnnnnnnnnnnnnnnnnnnnnnnnnnnnnnnnnnnnnnnnnnnnnnnnnnnnnnnnnnnnnnnnnnnnnnnnnnnnnnnnnnnnnnnnnnnnnnnnnnnnnnnnnnnnnnnnnnnnnnnnnnnnnnnnnnnnnnnnnnnnnnnnnnnnnnncttgtacctattgtaaagacgcaattagataataaaatccctaattgataatcattgaattcatccattacgacatggcaacattgactatcatgaactttatttttaacagaaagggctaccattcggtcatcactatgataactttcaatgccagtgcatgttgaaaatattataacctgataacctaattggttcaaataatcaacaatacgggcgattgaagcctcatagtcatcttgagaaacacctaaacgtttatcgaaaggagctagtttcctaactgttaaagctaccgttttctgttctttaattatctttttccaatgagaaacagcataatcattaacatctttttctgtatccaccaaaaaagccgtatcaacacccaatgttacattgtttaagttgaagttatccttttccatcaaagataaactaacatcttcacgtagtattatcttctctgctttagtaaaacaatattttgcgatatgctggaatttaggattctcaaaaggaccaacactgtgcccaactaaatatattggtttacccgctatatttgaacataagatatgttcaaactgtccagtgccatataaatcgacaaagaaagaaccaccgacctgaatgacagcatcatatttttcaagatctttaataaattcaacaacattatttggcaaaggaaaatactttaaaaaacctttgccttttgcatgcgaaactaatatatcaggaagaatactattcttgatcttccaaataacttttttaacaagcccaccatttttattcattcttgatgaatataggacatcttgcttaatagcagttcctagtaaaaaggctgaactccttgcataacgactcaaaatatcaacttctacatctggattgatctgttttatagaatccactaatcctctgagaattgcaccatcacctcgattaccgcaagtatgatttccaactagtaatattttcattattccctcgacaattaaattagatcaaatattcaaaaaacaattaataggctccatcttttcttaaaacaacacttatagttttaaataagatagctatatcattccacatagaccagtttttaacataccatgcatccaaatagacacgggtttcatagtcaacatcgcttcttccactaacttgccaaagaccagtcatacctggtttactaagaaggtaatagtcgacttcgtcagaataacgttcaagctctgcggttataattggtcgaggtccaaccaaactcatttcacctttaagtacattaaaaagttggggtagctcatctaaactagttttgcgtaaaaacttaccaatatccgttattcgaggatcatcttttaacttaaaagtcgcatcccattctttacgtgcagcaggatcagtatttaaaagttgctcaagcacttctttagaattgacaaccatagatctaaattttagacatttaaaaggccttccgccattacctatacgctcgtgaccataaatggcaggcccatgatctttttttactttcaaagcaatgtaaattaataatggtgaactaactgatcttgaccctccatctccgaacagcttttgtatcttaagttaacgatgtccgctgccgccggtattccctcggggagtgatatcccagcgcgctgtgcgggtggttttcattgtaatgcgtgaacgctactgcaaggtttcgcagtgctgttctcacatccggttttggcatgaacgcgatatagtcttctttcatcgttttcacgaaccgttcggccatgccattactctgcgggctgctcaccgctgttgtgcagggctccagattcagctctctcgcgaacctccacgtttcatacgcggtatacgctgaaccgttgtccgtcagccactgcaccgctgtatcgggcaacctgtcgccgaagcgcttttccaccgacctcagcatcacatcctgcacggttgaactgtcatagcctcccgtgcttgctgcccagtctatggcctcacggtcgcagcagtccagcgcgaacgttacccgcagtttttcgccgttgtcgcagccgaactcgaagccatctgaacaccagcgcatatcgctttctgccaccgctatcttgcccttatgttcacgcttcggtcgctctggtttgtcatgcaacaacaacaggttatgctcgctcattatcctgtaaagccgtttggcgttcacaggtggctgtccctctgtgcgacgttgcttgcgcaggatgccccacacgcgtcgataaccataactcggcatatcgctgatgatgtcgaggatagccgacagtatttcttcgtctgcttcgtcattacgccggttacagcgcttgtcctgccagtcggcagaacggttaatccgcagtgacagctgcgcacgcgacacgcccatggtgcggctgaccagggctattccccgtcctttggcaacaagggcgcgtgcgctatccattttcgcgactggccgtactccacggcttctttcaggatctcaacttccatcgtcttcttgcccagaaggcgctgaagttcccggacctgcttcagagcagcagtaagctcagaagcaggaacgacttcctctccggccgcaacggcggtgaggctgccttcctgatattgcttcttccacttaaacagcaggctgggctggataccatgcaggcgggcgacatgggagacattcatgcccggctccatcgtctgctggataatggcgatcttctcctgaggagttttacgtttacgggcttcttgccctaacaggatcccggtcatctcaaaattggcgttagtgttagacatatattcaagcctatctcttatctggagatacagctactgtccggtgtttcagggggctacatcataatggtgaactaacaagaattatggtgagtgaacctataatatcaaacaaacgtttaagaatacgcgatgataatttcgctaaattctgttgtacacggaaaatcataacttcatggctaaaaataaaagacatatcagtactatccaatggcacaccacgcaacgtaggaataactgatacatatctaaaaccattaataagaaattctctaagccaatcattacgtatcgaactttcactagtttctaaagcgacaatgaattgtgttcttttatcaaaatgctttgttacttcttttggatttaaagatattacaggaatatcgttaatgtgatttttgaggtgatcttttgatgtgcttgaaacaaaactagttacattaaaacctaagtttgattcactatttattgctttccacgcttctactgcgttatttccatcaccaattattattgtttcacgcttccataatccaaaaaaattcaaacactttttagtgagcatacgaaatgtagggacaaaaaataatacgaaaatccatgtaactgccaaaatataacgggagaaatcccaataagcaaatgataacactgcaatttcaattattgcaaaaataactaaggtgcgtaatatttcttttaattcgaaccagaatgtcttcctgtaaaaataatgccttaggcgaatggaataccacgccacacaacatatgcctaaacaagtgtggagaataacccaatcattaatattgctattagcaataatatgtccgccatcattcataaaagatttcacaaaaaagattgcgaatacaatagcaaccgtaaaaccagtgaaatcagatatcgctaataaaatacttgtccaaaaatttcgagctagacgagacatatatcctcaccgagtaaattatttcccaagtaatataaaataatatnnnnnnnnnnnnnnnnnnnnnnnnnnnnnnnnnnnnnnnnnnnnnnnnnnnnnnnnnnnnnnnnnnnnnnnnnnnnnnnnnnnnnnnnnnnnnnnnnnnnnnnnnnnnnnnnnngggttatttcttgcttaaacctttcctcagaaaagcgaattgcattttctctgcaatgttgtggattaaatacatcgatatttttttcaaattcctgaacagcatttacaagagacttaatttcttgtttataaaaaaatacaccagtagctttattaaccccgcatggacgaactgtttccaatgctccacccttgccaaaagctattacaggagttccacacgcttgcgcttcaactggcgtaatgccgaaatcttcttcagctgcaaatacgaacccttttgctttttgcatatactcttgcatcactgaatttggttgatatcctaatagttcaatattacttgaagcttttgccttaatctttgacatctctgaaccatcacctattactacaagctttttatcaggcatttgtgagaacgcctcaactatcaaatccattcttttataaggaaccattctggatgctgtaaaataataatcatccttgttttcacataacccgaatctattaacatcaaccggtggataaattacttttgattcacgtccatatacttttctgattcttctagatataaactcagaattagcaatgaaatgatctactccatttgatgtacggcaatcccataaacgtattttatgtaataaccatcgagcaaccattcctttcatacctttatccaaacccgcctctttaatatattggtgttgtaaatcccaggcatatctaattggcgaatgtatgtaagatatatgtaattggtcaggacctgttatgataccttttgcaacagcatgactgctagataatataatatcatgttttgaaacatcaagttgctctatagctaatggcatgaatggtagatacttttggtatttaactttagaaaaagggaatttttgtataaagctagtagttgctttctttcccttgaaattaactctatcctcatcggatagaaaatcaacaattgaatacaattcactttcaggaaacacttctaaaaattctttaattactttttctgaacctgcgtacgtgaccaaccagtcagcaacaattccaatattcaaattatgcatgaattaatccttaattgtgaaaatattcaatttttattctaaaaagtcaataactcaatctattacaatataaacatgttacattcataaactaaaaaaactttgtgagtcaataacctttctttaacaatgagtgttgttacaaaaatttatgcaaaacaacaaaatgaagtcattttttttgatctcattattttttgttctcgttatagtgatgcggcattaagaaatataaaaaatgcattttatataatacatttaatcgtgccttattactttgccatcataaattcagctgaagcttttggttccaaattatttttgaagaaaccaaaattatgctctttgtttttaatatctgttccatcatcaataagatcgtaccaccaaagccccttaatataagatcgttttttgactaggctagtatattctttaataaaatttgcagactgtattaaatccattcctccaggcccatcataattcgtcacccctgcttcagttatatatacatctatgctcctccctgtttttttagtaaagtaagtatggaatgcatctatacgattaagattaccctgtggtgtacgtaacagcggattaccattcataaatgaatatgtgtgcaatgatacaccatcaatataattcaaaattcctaagtttactagttgctcaaaccatttccaatcattaacatcaatatatcttgctcttaaatcgagaggatttatagaacccgcaagaatgatggcattcgggtcattcctttttattacttcactagttttttttactaaattataatagacattggccgaaggaacttgatttcggtatttaaccatgccagtagctatcgtccattcattccatatctcataatatttaacttttcctttataacgatgcgatacccatcccgcataattagcaaatgcttgaatgtcacgttcagttgtaggataacctccgttattatacaacttattaccataatcaagaataacgagtggattcaaaccatccctgtcagcattaagtaaagcatnnnnnnnnnnnnnnnnnnnnnnnnnnnnnnnnnnnnnnccttcactgccttctgttttcgaccatggataatcatcgcgaaaagatgtaaaacctaattctttgattaatgaaatatnnnnnnnnnnnnnnnnnnnnnnnnnnnnnnnnnnnnnnnnnnnnnnnnnnnnnnnnnnnnnnnnnnnnnnnnnnnnnnnnnnnnnnnnnnnnnnnnnnnnnnnnnnnnnnnnnnnnnnnnnnnnnnnnnnnnnnnnnnnnnnnnnnnnnnnnnnnnnnnnnnngtctctagttcgttcttgacattatttatggttttttgccaagtaaatttcttaacttgttttaatccttcctcaactaatttttgcctcaacgctatgtcataataaattttttcaattgccaagcttatatctccgtgatttataggatcaactaataatgcagcatcaccagcaatctcaggtaaagatgtgacattagaggtaattaccggagttccacaagccattgcttctataacgggtaaaccaaaaccttcatacagagatgggaaaagaagcatatttgctcctttatataattgagctaatgtttcattatcaactcgccccatgaattttattcgattcgatatatttaatttttttgcatgatttaatagttcctcacttctctcgccagtaaaataaagcatgacagcctctggaatatttgcagaacagaaagcattcaacactgcaatttcatttttatgcttcttccgattaccaacacttaaaatataattttctttaagcccgttaacctctaaattaaattcttttgaaacaccattccctactacctttactttatcttgattaattttagcccattcacatattcgtttctttgaaaactctgaaacggttaatataactcgtgctttccggcatgctctttttaatactaaattgtaatacaaccgtttaagaacacttgagttaaaatcaatgtctatgtgatttagatcatgaattgttatggctgtacgattaagatggaaaaaaggagcattataccctggtgtgaaataataacctctattaaacnnnnnnnnnnnnnnnnnnnnnnnnnnnnnnnnnnnnnnnnnnnnnnnnnnnnnnnnnnnnnnnnnnnnnnnnnnnnnnnnnnnnnnnnnnnnnnnnnnnnnnnnnnnnnnnnnnnnnnnnnnnnnnnnnnnnnnnnnnnnnnnnnnnnnnnnnnnnnnnnnnnnnnnnnnnnnnnnnnnnnnnnnnnnnnnnnnnnnnnnnnnnnnnnnnnnnnnnnnnnnnnnnnnnnnnnnnnnnnnnnnnnnnnnnnnnnnnnnnnnnnnnnnnnnnnnnnnnnnnnnnnnnnnnnnnnnnnnnnnnnnnnnnnnnnnnnnnnnnnnnnnnnnnnnnnnnnnnnnnnnnnnnnnnnnnnnnnnnnatatatacctaatatatatcctcctgtagcaataatataaagatacatgctatcaccaggattgtaagtccctgatcccagttttgagccaaccccgattgtacctagtccagcaccgaacgttaagctgccaaattttaatattgactcgacaccatctggccacgtagtggttaaacgtgcatttaaagatcctaataacatagtagttgcaggatcattattcatttcaaaggaatagttcgtggacataatggtgaaaaacgtgacaacaattgcaaatataagagtacttctccataaaagtttaacaggtaaaattttcataaatacgtaaaacagcaatatcaaatgcaatgcaaatgnnnnnnnnnnnnnnnnnnnnnnnnnnnnnnnnnnnnnnnnnnnnnnnnnnnnnnnnnnnnnnnnnnnnnnnnnnnnnnnnnnnnnnnnnnnnnnnnnnnnnnnnnnnnnnnntgatgaagcttgaagcgaacttttaaaaaaacccgcatatcttgtatatccaccagtcgttcccatttgagcagatgacacatcnnnnnnnnnnnnnnnnnnnnnnnnnnnnnnnnnnnnnnnnnnnnnnnnnnnnnnnnnnnnnnnnnnnnnnnnnnnnnnnnnnnnnnnnnnnnnnnnnnnnnnnnnnnnnnnnnnnnnnnnnnnnnnnnnnnnnnnnnnnnnnnnnnnnnnnnnnnnnnnnnnnnnnnnnnnnnnnnnnnnnnnnnnnnnnnnnnnnnnnnnnnnnnnnnnnnnnnnnnnnnnnnnnnnnnnnnnnnnnnnnnnnnnnnnnnnnnnnnnnnnnnnnnnnnnnnnnnnnnnnnnnnnnnnnnnnnnnnnnnnnnnnnnaaccaggatagtaattaaaattaacaatttaggtatagaaaataaaagctcagcacctaacaaatggaacaaccagcgtaatggtcctgcgaaaaactcaaatagtaaaaataaaagtaatgagaagtttattaatcttgattcaaatgattgcaatgtcatattaaactctcatttaggcnnnnnnnnnnnnnnnnnnnnnnnnnnnnnnnnnnnnnnnnnnnnnnnaaatagctgtttgacatcatctgctaaatcttgatgaagtgtatatctttgaaagatatctaattcatgctcgatatcatttatgatggaaacatttggcattatctgagccaattcaatcattgctcccatagaagttgtgataacaaactttcctgccaatgcacattcaacaactgtacggccaaaaggttcattccacttcaacggtagaataacaatgtcaaccagttccaagaattccgccaaatccatataacccaaaacctcaacggagctttcaatggcatcttttttaagtaaattgctatcatttccagcctgaaaattccctgcggcataaaacttcagttcatttacgtctttatattgtctagctactttacaatatacatcaaaccctttttcaaccgacaatcgaccaataaaaccgatccttattttatcgctctcattttttttcggcacatacggagtaactgagttatatataaaatccgaagtggcttttttaaaaaagccacaatccttatgtaaattagtaatatatttactaatgccaatataattatctactttgttactttttatttttttaaaccaactccaaaatagaactgataaagaacttggtgacattactttaccacttttaaacagtgtactgttcggatggaataaataataatcacgagaagtatgtacaagcttaaccttcgctttttttacagcatcccatgctgataccgaaaacccacatatattatttgtgtgaactatatctggtttaaattgcgcgatctgtacgcttaccatttttttcatttcaaaattataacaatcaatgaaatgccagatggcctttttaaattttgatgttgttgtgttggggaaaccccaataaatattcttaagaggaagataagtgacctcaactccattgacaaaatctgtttttatttcttttttatcatgaagtgttattacctttacttcattctctaatttaactaattgttcagctaataattgaactgatatttctgcacctccgactctataaggataataaagagagtttaaaatcattattctcataaacaaatcactttcattaaagttagaatcaaccatcagtacaatttgtgaatactgtactgatggtttgtgctttactctttattggagtaagaatagccataatggctataaccatacccataataactgcttgctttctttaccactccatttaatatacagcctttaatcattactccgctctgttcaaagcgctttgcactgacttctatttcttttactgtattttgttcaaatcttgcgactaaaagagtagtacctgcataattgccaataatagctgcatctgttactgccaaaatcggcggagtatctacaattactaaatcataattgtcactcgcccatgaaagaagattctggaatcttgaatgcattaataattctgctgggttgggcggcaccatccctctggatatgaaatcaaagccagctgttttaatttgtttcacgcaattttttatatctacttttcctgctaaataatccgaaagaccgttttcgttagatacattgaataacttatgcgtataaccttttcttaagtcagcatcaaggaagagaacttttttacctgtttgagaaataattgctgctaaatttgaacttacgaaagtcttgcctgcatttgggctagcccctgaaatcataagtatattattcctcgcttccatcatagcaaaatgtaaacttgttcttaatcccctgatggcttcaattgcgaggtcagctggattttggatggccagaaactcgtcatactccagactctttttcttattagattttaaaccctttgtgatattctttgcaaatgtctcagaaactggaatactagcatatacattaatgcctagtacctccaattgctctggcgattcaattccacggcgcaagaaaactctcaaagcaataattgccactgaaacaatcaggccaaatataataccacctataactattaatatttttttaggtgctactggtcttggttgtgttacagcttcatcaataactcttacatttccaatagcacttgacttagcaatattcaattcttgttgacgatttaataactgcatatacacagcgcgaccagaatcaacatcacgacttagtcgtaacacctcttgttgtgtttctggcatggccgatactcttttattgagcttggctttctcttcaagaagcgtcactcttttctccataagagccttataagtaggatgctctttcgtgaaatgttgtgatacctctgattcacgtatggttagttcattaagctgattatcaacattgactatttgatccaaaactgcttttgcttcaagcgataaatctacagaatctttctgttgcctgtatttatttaatttatcttctgaaatatctaaatcatgacgtacttgtggtaactgcctatttaaaaactctaggcttttagcatcttgagctgcttgtctgtcaatattttgcnnnnnnnnnnnnnnnnnnnnnnnnnctaatattttcctaatctgtacaggatcatctcctgtcaatgacaatgtaagcattccagtatctttaccttgatcgcttactgtcaacacatcccttaaatcattratagcttttagcttgcttagatattcaaccgtaaatgaagtacctggctttgcttgaatttcatctacctttaacgaaatgttatttttctcaaataactctccaacttttacttcagcttcaaatgaatcggtctgaatagtgaatttatttgcgtcaataactgttagcgttaattctggtatgtcatcatcggttttaggtaaatataatcttgatacatttataatacctggtttatctcctgagagacgtgaaaatcctctccccaaaatcggaaaataattttgtttaattttggcttgcagattcaaatcgtcaaccgttttccctaaaatcattcttgattggagaagagtgatctcaggtgcagattgtggctgactatccggaagcatttggctcaaattgctcaatatggcattcgcctgcttttgttcaacttggattagagaatcagcttgatagatcggagttgaaaataatgaatagactaaagcaatcaaagtaaaaaaagcagttactgatataattagtttacgatgatcgataagttcaccatataaacgactcaaatctatttcatctgcatctttgttttctggcttatttttaagtgatgacatgtattaaaccccggttgttatacgctcagttttttggcccagatatcaccggactgtttaattaattcaaaaatcaaagtaaatacctcttcacttttgcgatacgggtcaggtatatccttatattctgcccaatggccaaacagcatcgttttccctctaacttcaggtgcaatttgacttattttctctatgtgttccttctccatagctaatatgagatcgtattttcttcctaaagtacttgtgaattgttttgcacaatgatttgataaggatatgccataattttgtgctatacgagaagcagtaggatcagcttcatgccctaccaaggctccagttcctgccgaatctatttttttgttaggtagcaaactttgtaaatatcgctctcccattggagagcgacaaatattaccagtacaaacaacaagaatcgagtcaaacataatcaattccaatttttaatataacggacagtttcagtcatatcatgaacacctgttatggttggaacaagttgtgatataacgcgattccaccttacaataggcgctgcagtaacataaactatatcataaggttctaattgaaattcagtgcctaatacnnnnnnnnnnnnnnnnnnnnnnnnnnnnnnnnnnnnnnnnnnnnnnnnnnnnnnnnnnnnnnnnnnnnnnnnnnnnnnnnnnnnnnnnnnnnnnnnnnnnctcatcgcctgtgatattccctcagcccttccgacagcctccataagggtcataccactgcgatccattttgagtgttgtttgcttaccaacttcccccatgacaaatacttttaaatcatcgtttcgaggaataaaaagtatatcacccggatacaataaatggttctgtgttaggtcgcctttttgcattaaagcatataatgaaatttttatgtcttttccattatgtgttaatactacattccgccaatccgcctccggtgctaaaccgccagcggcattaattgcatccattatcgtaaggggaatatttgttataggttgttgtccagactttgcaacttcccccgttacgtataccttttgtgaacggaacgctgcaatgcttacgtcgacttgtgggctttctatgtaagtagttagacgacttgcgatttcctgacgtacttgtgataaagttttacctgcaactttaatcttacctatatacgggtaaaatatcgtgccatctgagttcacccagttgcctgtatcacttgcactccggtactgcccagctggcgtagtcaattcaggatggtcccaaacagtcaccattaacacatcgcctacaccaattcgatactcatagttgccaagcagtctatctaaatcgggatttgattttgctaacactgcttcgggtcgtaattgatcaaccaacccaggtgtcatcggataaacgttaacgagtttatccaggtcgtagtcgctatccggaagttcgactacgttcttacgcagactgtttaatccttgaccagggataatcgtacaacccgataaaaacccaattgccaatgctaatgccgaaaatctaacaagttttttcttcataatgtcacatcatcagtaaatcaaaatttgccaattcctgagcagctgtcatagccgttacttccctgccggcttgtggagagataaaagctgactgcgtcctgcagggctaccaccctctctcccctgttttcagcattcagccttataaactaaacggtatttctatccctgcgctggctccaacgtcgtcgctgtcgctattgttagcattggtgtaccagagggaggtattcaaacgaaccgaccgataaacatctccgctccagcccagctgtacacctttcagagtatccgcatgagggaacgctttgttgatcgactgattctcagggttaaccttcgcgtatactaagcgcgagctccagcgctggttatcctccgtaataagctcaacttttcctgcgataagctgaccatccccgcccattgcgtcacccagcggatagccctgctgatagtagccatccttatagatatgatgggtataactgtaattggttcggctcatattggtacgcgtgtcatgcgcttccacgtaccagttaaccgcatctttgccccacccatggtgtccttcaacaccgccaaggaacatatttgctgaaggcaaaaaaccagactcatcctcgccgatcatctgcccgtagaagctcaccggccagccaagagtcggctcgagtttgaacttaaaatcgaacccagcaagttggttccccggttcattgggatcgtttgcggcggtattatccttgcctgttaaaccatcccagaagttgctgagtgattcagggcgcccttgccccccccattgcataatgcgcgacgcacctaattccagtgactggaatggtgagaaagtgaaacgaccgccgataattttggcatggggcactgcggtatattgattcatctggctggcagagatctgatactgccatggccccacccagcgcagccaccaggtctctggcgccgcctgctcggctcgctgcatcaggaaaccggtcatcggtcgcattgcatccccgcgaatcaggctaccttcatagccaggcccccaccactgtggtacctggccaaaagagagccactggttccagaacttcaccgcgccgtatgcgccgttggcgttgaagcgcgatccgttgctgatccgctctcccccttcaacgttgccctggagatggatatcccaccactcgccgctgttgttgaatgccaggcctaacgagttatccgctggctgcgtctgaccaaacccctgcggagtgcccggctgatcggttgaagtgtagccggtgacccggaaatccgcttttaaggcagacagtcgctggttgatacgcgccagcaccacttgctcagaagagtaggaaggtttggcctttttcagcgcccgggcgatctcttcctggctcagcggccacgtcgacaggctcagatggatgaccccgcgatcggaaagccaggccaggtcgttacgcaagtcgttgtcatttaccactaacccggccgcgtaagcctgggctcccagtgaggaaagcaaacccaacgtcacggcaatgcgcgcaatttttatcattgtacaagatccattttcagccccgctgtcgtatctcaatgagaatgaggggaataccaagatagaaagcgctcgcggcaccagctgacttcgctgtgcaacaccggcgaggcaagtacatttaccctaagctgcttgttagccttataacatccactcagctcacaatgtaggcgaattttaccctacaggctatcgatgagacaggaaagttaatgtccaggcgatatcagcagccgctcctggccaacttctgaggatatccgtagaaaattgatagatatctattgagggcgatcatcctgaccgggacgattttacagccgttgaagagaacctctgtgcagcagcaagcggcttcagcgacgctaccgcccctggcttaacagctaccagcgcactgactacctgaacgacttaattttttatcgacctgtggatgaataattggtcaggccattatttttggcggcgttaagtttacgggatttcggtcacaattgggagtgttgttaccgaatatctgccaattaatgccgcctgtcgttctactgacaaaaaataagcgggtcaccaattaagattattcactgacttccagggttagaaatcttcccggtactgctacatcatcacatatgtagctaactgactgtaaaaaaacgtcttttcccatagctcatcttcatgcaaaaatcagatgatggcgttatagtcaactacaatttctaatagtttccagtatctggatattcattgaatgtgcatcaggtaacgtctcagcgcatttaagaaacgtctgatcaaagctatatccagacaaatatgcattaacaatgtagtagcacttcattatttcataaatatgaattatcaattaccgggtatatagtagattattttcttatttgtctaattaaccggcgaaaacttaatttcccctgtaaaacaaatggcgattaccaggcctgcttatgcaggtcctctctggtaaaaggtttatccagcggcccaattgcggtggcgatttgccccagcagggtctgtgtcggcgctttactgccgctatgcaacagtatcagtgggaccattactaggcatgcaattccaccccagggtactgtcttataatcgcagtcagaagtgcgtttttgcagcagcaggaacaaagcgctgccggcagcgcccagcagcaggccggcgatcacttccgagacggaatgcgcatggatgaccagccgcgaatagcccaccacggcggccagaacatagccggtaataatggccgctttacgcagaccggcggagaaacgggcgctgagcagccacaggaagataggccagaaggccgcggagagcgcggagtggccgctgaagccggtgtaatccagctcgcgaatacccagaccccagcccataaaggccagtttggaggcgcagacgatagcgccggtgatgccgaacagcaaactccactgccacgccagcaaccgcgacgttttacgcagcatcaggacaataaacagcgccgctgcgctgggcagcaaaacggtgctatcgccaaaaaatgagatgagttgccagttcatatacctgtgatccttcgatgatgtccactgccgtgctcagggattatccgtaatgtctgtaccagctcgcatgccaattcatttcacatttttatgcatgcaagtgagatgtttaaagcggaaacatgatcgcagtcaagttttatttttggctgtcgttgaccgctttcccttcgctttaggaattgtcgcactaagtgactattcataaagcattattgccgctactccgaccattgcaccacagaggccagagacaaactaccagaagtctccgaagccatacgtttctttacaatcgttataacattcacgttatgaataatttctgcataacgttatgagcggcaggacgaatgcttcagccttgccgctcggtttcaggctggcgctcaggccagcagttttttaatgctttcgcggaatttggcgccttctttcaggttacgcattccgtaggtaacgaaggcctgcatgtagcccattttcttcccgcagtcgtagctttcgccggtcatcagcatcgcgtcgacggactgcttcttcgccagttcggcaatggcgtcggtcagctggatacggccccatgcgcccggctcggtacgttccagttcggcccagatatccgccgacagcacgtagcgccccaccgccatcagatcggagtccagggtctgcggttcgtccggtttttcaataaactcgacgatacgcgccacctggccttcagccaccatcggctctttggtctggatgacggagtattcggagagatcgcccggcatacgtttcgccagcacctggctgcggccggtctcgttaaagcgggcgatcatagcggcgaggttatagcgcagcgggtcagcggtgccgccgtcaaggatgatatccggcaggaccaccacaaacgggttgtcgccgactaccgggcgggcgcagaggatggagtggcccaggcccagcggctgcgcctgacgcacgttcatgatggtcacgcccggcgggcaaatggcctgcacttccgccagcagctggcgcttcacgcgctgttcaagcagggcttccagctcgtaggaggtgtcgaagtggttttccaccgcgttcttcgaggagtgcgtcaccagaacaatctctttgatcccggcggcgacgatttcgtcaacgatgtactgaatcattggcttatcaacgatcggcagcatctcctttggaattgcctttgtggccggcagcatatgcatgcctagtcctgcgaccggaataaccgctttcaaattcgccatattcatcttcacctgtttggttgcaaaacacgcggttttgcaaaattgtacatgtcacaaatccattgaaactgataatacacggatactgcccaggcatctgcccgccaaattcttaaattcactgtcacgtaaaagaatacacacaactcccttttatcaacagttagaagtgagaataatcttattctcgttcaggttattcagcggctcgttcctttgcgccgcgcgatgtggctgagaggcccgtccatcggagtctgttggccgccggacccgccgcaccgcgcgtatgcccggaaagaatagatatagataataaatttcgccaggcaatatatttcagcataaacagccggatatgacgacatattagcctgaatccgcggcggtgaaccgcgatccgccctattctgcactcacttcataatatgaattatgccggttttgtgagcgggcttcgcgcttcgcttctgctctgcgcatccgcgctcaccgtgacgaaccgcgggaggaagcccttttgccgccctcgctgaaacgcagcggaaaaagttctgatatcggcaagcttattccatggtcgccgccatggtgttattttttcactgttcttttccggaacataattcttatcggttcgcttaatccactggaaatatatccatccacggcagggcgatatccgcgtcgttattgcattttagactcatcttatccatgatcgtggtaacacataccgcagtcgtacaggttttaatacatatggaatggattgccgatccgtcaatctgggcaggtctcgtcacgctggtggttatcgaactggtgttgggtatcgataacctggtctttatcgctatcctcgccgagaaactccctcccgcccagcgcgaccgcgcgcggatcactggcctgatgctggcgatggtcatgcgtctcctgcttctggtctctatctcctggctggtcaccctgaccaaaccgctgattgtttttcacgacttcagctttagcgctcgcgatttgattatgctgtttggcggcctgtttctgctgtttaaagcgaccgtcgagcttaatgagcggctggaggggaaagacagcgataaccccacccagcgcaaaggggcgaaattctgggccgtcgtggcgcagatcgtggtgctcgacgccatcttctcgcttgactcggtgatcaccgccgtcggcatggtcgatcacctggcggtgatgatggccgccgtggttatcgccatcagcctgatgctgatggccagcaaggcgctgacgcgcttcgttaacagccacccgaccatcgtgatcctctgtctgagcttcctgctgatgatcggcttcagtctgattgctgaaggcttcagctttattattccgaaaggctatctatatgcggccattggcttctcggtaatgattgaagcccttaaccagctggcgcagtttaaccgccgtcgcttcctctccgccaatatgacgctgcgtcagcgcactaccgaagcggtgatgaatctgctgagcgggcagaaagaaaaagctgaactggatgctgacacggcgtcgctggtcgccgatcaggatcaacatccactgtttaatccgcaggaaagactgatgattgagcgggtgctgaaccttaatcagcgcagcgtcagcagtattatgacgtcgcgccatgatatcgagcgcatcaaccttagcgcgccggaggaagagatccgcagcctggtggagaaaaatcagcatacccggctggtggtcaccggcgggaaggataatgaagatctgctgggggtggtgcatgttattgacctgctccagcagtccctgcgtcaggagccgctggatctgcaggcgctggtgcgtcaaccgctggtcttcccggaggggctgccgctcctctcggcgctcgagcagttccgccaggcccgcacccattttgcctttgtggtcgatgagtttggctccgtcgaggggattgtgaccctcagcgacgtgatggagaccatcgccggtaatctgcccaatgaggtggaggagatcgatgcccggcacgatattcagcatcatcaggacggttcgtggacggtcaatggccatatgccgctggaggacctggtgcagtacgttccgctgccgctggatgataaacgtgagtatcacaccgttgccggtctgttgatggagtatttgcagcatgtgccgcaggtgggggaaaccattgagattgacggctataccctgcgcacgctgcaggtcgacagccatcgggtgcagaaggtgcagatcgtcccgccggtaaagcaggatgagctggattatgaggtgtaatcgtcaggcataaaacggcccggggtatcccgggccgtaaaattgatagccagatatcctgtttaatgcctgatggcgcttcgcttatcaggcctacgggatggcgaactaatcgggggatgacacccaccgtataatccaggccgggtcaggcgtagccgccacactgccgatggcgcttcgcttatcaggcctacgggatggcgaactaatcggggtatgacacccaccgtataatccaggccgggtcaggcgtagctgccacactgcctgatggcgctgcgcttaccaggcctacgggatggcgagctaatcgggggatgacacccaccgtataatccaggccgggtcaggcgtagccgccacactgcctgatggcgcttcgcttatcaggcctacgggatggcgaattaatcgggggatgactcccaccgtataatccaggccgggtcaggcgcagccgccacccggcatcatcgtgacatcaaacgttgacgataagcacacagcccggaaacttccgggccgcggtggtaggaattacagcttatcaagcagctttttggcatcgttgccgtctttgctgcctttattacgctcaacccagtcgttgaggcgctgcttcgcttcatcctgcagctgtttgcgcaggatctgatcgacctgcagactgtagctcagcgactgccactcgccgtagatgcgcagcgggatagcggtctgtttcaggcggtcgataagcttgccctcccctttccagccgccgagcacgcgcacgttgaagcgcatatcgcagttctctttctgcagatcgagctgtccttcgccggtcatcgccatcacgtcggactgcccctgcaggcggttcagcgtcaccagcccgttatccagcgtcagccggctgctcacggaatccaggcgggtggcattgtcgtaattttcctgcgcccgcacgttggtgctgcgctccacggcctgctgcaccagctgctggaagttcagcccttcggtgcgggtatcggccatctggagctgagcctgtccctgccagtggcgacggaaatcatcggcgtcaatgcgcgttccggaaaattcgccgctcagcgacagcttgccggtcaggtttaaggaatagttaaaggctttgatcagcgaaccgatctcaacattccgcagcgccggctggaacgtcgccagcggcgtgtcgccgcgggcatccagggtgccagggagagagagctgcccgccgtcaagattgccctgcattttgctgaccgtcagcagcccctgctggttgctgatttcgctctgcacctgggtgaagttcagaccgcgccactgcagctggtcggcgctcagggccattcggccgttgaagccgcgcaggctctggtaatcttcgcgctcatcactgtcggcgatcaccgggcgcagcggccgtgtctgactctggccctgctgactggcgctactgtccgtcgccggcgacctttgcgccagcagactatcgagatcgagagtggtggcgtgcagatccaatgaccagtccgggcgatcccccagcaccacgctgccgctgccggtaacggtgctgcggttagccatcagattcaggttgtcaaaacgcagggtcttgtcatcttcctgccagctggcctgcagacttccctgaccattaatgccgtccggtgggagctcggcgccgcgcagctgccagctaagctgggtaaagtcggcttttaaggagtgcggataatcgccgccctgcacggtggcggagaagttcagcgccaggtcgcgctggtcgcggttcacccggccggagaaatccacggtggcccggtgattctcatcctgctccatctgcagacggatatcgcgcacggtcacctgctcgccgttctcatgctggaagaagagcacgctgtcggccacctgcagctgacgcacatcgtaggaccatccgcgatcctccggggccagcggcagggtgttgtcatgcggcaccaccggcgctgagctgtcgcgaaccgcctcggttttcggggtcagctggatcaccgcgcccttgagcatcacctgcttcacctgcagctgatgcgagagcagcggcagcagcgccacgtcgaggcgcatattgtcggcgcggatcaccggctcttcggcgcctcgggcggtcagcgtcatccgtccgctgagaatgctgagctgcggccagacgtgccagcgcagcgggccatcaaggtcaagctgataaccgctgcgctctgccacctcatgcaccatataggcgcgaaaatcgttgggattgaccagcaataccaacgaggtaagcccggcgacaatgaccgccagcaggatcatcagcgttgtcagtattcgtctcatggcaccctcagcaacaccccgttgacgttatcaatccttgtcgattcggctcgccaccgcaccctgctggtcgcgatatttggcgtcttcacggcggttatacggccgggccgccgggcccgataacggttcaaagctcagcgcgccgatgggcatccccgggcgcagcgccagcggcagcttgccggagttgtaaaactcaagcacgatgcagccggaccagcctggatcgatacggtgcgcggtaacgtgcaccatcagccccaggcgcgccagcgaggagcgtccgtccagccagcctaccaggtcggcaggcagggtgacagactcgtaggtcaccgccagcgccagttcgcccggatgcaggaaaaaggcctccccttccggcaggacgatctcttcgctcatcacgcggtccagcgcggcgctgacctcggccttcgggccgcttaaatcgataaacggcgccgtgtggccacggaaggtgcggaatttattacccagccgtacatcaaccgtcgcgccattaatacgctcaacgggcggacgcggattgatggcgagtcgcccttcatccaaccaggcttcgatatctcggtcacacagacgcatgggctttctccttataaggctgcttcccgcacgcttcgcggcggagagggcaacagggctactctttgcacgttacacaattcggccaggttattcaaagaactgactgattttggccttcagaatatcaatagcgatgcggtttttgccgccgcgcggcacgatgatgtcggcatactgcttcgacggttcaataaactgcaggaacatcgggcgcacggttttctgatactgggccatcaccgagtccatggagcggccgcgctcgttaacgtcgcgcttaatacggcgcatcaggcaaatatcgagaggggtgtcgacgaaaatagagaagttgagctcgttacgcaggcgcgcgtcggtcagcagcaggatcccttcaaggataatcaccttcttcggctcgacgtgaatggtgttcggcgtgcgggtatgctcgacgtagctatagaccggcagttcaatcggctggccgcttttcagcatctgcaaatgctggaacaacagactgtggtccattgagctcgggtggtcatagttggttttgacgcgctcttccatcgacagatggctttgatctttgtaatagctgtcttccggaatgacgccaatatgttcgtcgccaacttgttcacgcaattcgcgatagagagtactggcgataagacttttgccagaagccgatgcgccggcgatgcctacaatgacgcactgatgggacatatcagtcataaatttttgcgacctgattaacctggatagagatggagggtggcggcggaccgccaaacgcggcaattatagggatttcagcgtcccgataccagtggtatgcgccccgggcggctattccgccgccggcgcccagtcatcggtataccagatatgcaacagcgcgtaggatcgcatcggctgccagcggcgggcatagcgggcgatggcggccggggtcattcccggaaagcgctgtttaatcaggtaatcatccggcaaaaagatatctttcgcctgccagccgcgcagggcaaagtagtttgccgtccagcggccaatcccgggcagagtctgcagttgacgcagcccggcgtcaatatccgccggcgccgtcaggggcagctcgccgctgagcgccgcccgggcgaggtggatcagcgcctccgcgcggcgcagcggcatccccagcgccttcagcgcctgcggatcggcccgggacagggcctctggcgtcgggaacaagacgtatccaggcgcctctgcaagcggttcgccccagccagccgccactttggcggtgagccgggcggccatcgccacgctcaccagctggcccagcaccgcgcgcaccgcctgctcgaaggcatccagcgcccccggcaggcgcagccccggccgcgcctgcgccagatcgcccagcgtgcgagcgacctgccgcgggtcgcaggctaaatcaaacagctggccaattcgcgcatagcagatctccgctaccggctgcagtcccggggaaagggtcacccgcaggccctgcgcctcttcgtccggcgccagatgaatcagcccgcggtggccttccacgccaaagctgcggctgtagcccccatcgtgaaaacgctcgacgccggcaaccgcgcgcgcctgcagaaaaccaaccatccacgcccagtcatagggcggggtccagggtaacagcaccataagctctcctttatatagcgtttcaatgatagtcgcccttgaccgtcagcgccttgcttttaaattccggttgtcggcatggcgacgatccgctaaagtcgccccccttcttcaccggcatggggattttgcagacgatgtttattggttttgactacggcaccgccaactgttcggtggccgtgatgcgggaaaataccccccagctgttaacgctggaaaacgacagcgccctgctgccctccatgctctgcgcgccgacgcgcgaagcggtcagcgagtggctctatcgccatcatgatgtccccacccacagcgacgaaaaccaggcgctgctgcgtcgggccatcgccgccaaccgcgacgaagacatcgaggtgctgcgcaacagcgtgcagttcggtctcgcctcgctgcagcagtatgttgaagatccgcaagaggtctacttcgttaaatcgcccaaatccttcctcggcgccagcgggctgaagccgcagcaggtggccctgtttgaagacctggtctgcgccatgatgctgcatattaagttgcaggccgaaagccagctgcccgagcagatcgaccaggcggtgattggccgaccgattaacttccagggcctcggcggcgatgaggcgaacgcccaggcgcaggggatccttgagcgggccgcccaccgcgccggtttccgcgatgtggtctttcagtttgaaccggtggccgccgggctcgatttcgaagcgaccctcagtgaagaaaagcgggtgctggtcgtcgatatcggcggcgggaccaccgactgctccctgctgctgatgggcccgcaatggcgggagcgcgccgaccgccagcagagcctgctcggccacagcggctgccgcatcggcggtaacgatctcgacattgccctggccttcaaatgcctgatgccccttctcggcatgggtggcgaaacggagaaaggcaccgcgctgccgatcctcccgtggtggaacgcggtggcgatcaacgacgtgccggcgcagagcgatttctacagcaccgccaacggccgcctgctgaacgatctgctgcgcagcgcccgggatgccgacaaggtggctctactgctgaaggtctggcgccagcgtctcagctatcgtctggtgcgcagcgccgaagagagcaaaatcgccctctccagcgccgccagcgtcgaaaccgcgctgccgtttattcaggacgatctggccaccgccatcgcccagcagggtctggaagccgcgctggatcagcccctgacccgcattatggaacaggtgcggctcgcgctcgacagcagccagaccaccccggatgtgatctatcttaccggcggcagcgcccgttcgccgctgatcaaaaaggcgctggccgctcagctgccgggtattccgctggccggcggcgatgattttggctcggtgaccgccgggctggcccgctgggcgcaggtagttttccgctagccctcgcccggcgctgccgcgcagcaggtctgtcctgatcctggcgctgcagattacgctggaatattcctggtctcccacgcaaaatggcctgttcgtccggacaggcctgtccactctcccccgcttccgggggcgtattatccataccgtagccagacgtctgcggtcagtaatctttgcatgccgcaagggggcgtgattgaaaagggtgtctgcgatcttcgcggcggtccggcgttgccggccgcggctcctggcaggctggctgctcagctgtggattactcttgctgctggtcgccccgcaggcgcaggcggcgacgcgccaggtggggattgatattccggttcagtggtacgccgacgacagcggccagatgaccctcgatcgttttgccgccctgcccgcagaccagctcgccaccacccggcagatcccctcctttggttattcgcgaaaaacctggtggctgcgcagcgagctgccgggcacgtggtttgccggggagccgcgttggctgcagctgggccccactttcgtcgaccatctgaccatttactaccggccactgggcagcgatggcccgtggacgcagcgcatctttggcgatcgcgacggcgcccgcggaagcgatctgcattatcgggaaagggtgctgatactgcccccgccgccaaccgccgccggctatgagctggtctttcgcctgcagagcaccagcaccctgatcctgctggcctcgctctcctctgcgcaggcgtttgtgcagcgggccaccgctgacaccgctttctggagcttctacttcggcctggccgctgtcgccagcggtgtggcgctttggctggcgctggccctgcgccggcgtttgctatggggcatctgtcttttctcgctcaattatccgctggtggccgctctgcacggcttcccggagtggttcttcggccacgccgcgctgccgttccaggattttatgatcagtagcctctcgctgttcagctatgccaccgccctctggctgcatagcgagatttttgatctgaagaagaatatgccgcgacttcatcagctgctgatcgccgccgtgatactcaacctggtgctgcaggtcagtattccgctcgggttttacggcttcgcgatgcagattgaaggggtagtattcatcattatcaccccggtgctgctgttcacctcctggtggctgtggcgcaaaaaagctatcgaccgtaccaccctgctgctgggtctgctgccgccgttctatgtcgtcgccgcggtgctggtgcagttgtcgatccatgggattatcccgttccatatggcgatctattccctctggcagtacgcgctgatcgtccacatcattacggtgctgatcattgccatcctgcgggtgcgtgctgaaaaccgccagctggagcagaagcagcgcctggcgcgcgaactgcagattgagcgtgaagccagcttccaccagcggcagtttatgggcatggtggcgcacgaattccgcaccccgctggcggtgatccaggctgcgctggagaatcttcgcctctcggcggcctcgaccagccaggaggcgcgcttcgatcgcatcggccgcgccgccacccgcctggtgcagctcaccgataactgccttgccgacgcccggctcgcctcccacgatctgcacgtcgagcgccagcagaccgccctgctaacggtgatcaacatggccgcctcggtggtggccatctcccatgatcactacctgaacatccgccagcacggcgcggtggaaagcccgcagctgcaggccgatgccggcctgctgtgcatcgccatcgctaatctgctggataacgccgtcaagtattcgccccccggtgaaatcgccatcgatattcattccgatgccgggcaaacggagctacgcattcgcgaccacggcccgggactccccgccggacaggcggaactgatctttgagcgctaccgccgcggcgagcacacatcgccggtgccaggcggcaccggtctcggactgtatgttgcgcgtcagatagtgcaggctcatgatggcaaactgtggctggccgagcatggcccggacggctgcacctttattctcaccctccccacggttgcttaagaggagaacgacgtatggctttacggctggcgataattgaagataacgccgatctgctggatgaactgctggcctggctgggctatcgcggcttcgaggtgtgggggacgcgtagcgccgaagccttctggcggcaactgcacagccatccggtggatatcgtgctggttgatatcggcctgcccggcgaggatggcttcagcgtactgaactatctgcatgagctggggcactacggtctggtggtggtcagcgcccgcggtcagcaacaggataaattgcaggcgctgagccttggggccgatgcctatctgatcaaaccggtaaacttcgcccatcttgccgagaccctcaccgccctcggcgcgcgcctgcgccaggaccgtccggcggctccgcctgcggaggcgatcggcacgccgccggccgtctcccccggcagctggcgtctgcaagaggataaactgatttcacccgacgcccggacgctggagttaacccagcaggaatatcgcctggtggagctcctgatgcgcaatcgcaacgaagtgtgcagcaaactggatctccatgcctgcctgttttcccatgaaagcgagcctgacctgcaccggatcgacgtggtggttagccgcctgcgtcacaaggcacgccagcaggggatccacctgcccgttcgcgcaatctttggtaagggactggcctttatttcctgaacgacggggctcgtcggcggccgcgcgggatataaaaaactcgtaagtgttaatttttctcattttctgagagaaatgagaggaatgagactgacgatgaccttaagaactttcttatagtgctagcacatcaggatgatggcgtaagattttcacgggacagaaaagcatataacaaaacgtattagccgttcgcggcaaattctgacaccatgcaacacaatcagggtaaaaacgatggccatgcaaacgtggttagttttattgctatgcatttttttcttcagcatctctgtatacagttttatttcctatctgaaagacaggaggcggcagaaatttacttttaacgataagcgttcgatgcgtcgtaaataattcactttaaaataataaaaaattattgtaggtgcttttatatcttcaacacaccgcatacgcccggaggatttgtcacagcatggcgttatgttttgcgtaaggaaataacgccatgagaaacattaatgtcaccatcaacacccgcaacgcctttgtccgtgaatcgctggtggccatggtcaatgacctcacccggggcgatctgcgggcgcgtttttcctggcgtaacaccgatctgtcagctgaagatatcattatctgcgaagtgatccccggggaaatatacctgtgtaataccctgattaagaacagaaaaagaggtagctcgctgattattctccatagctatgaccagctgccggaagatgagttcatgattaactgcctgaaaggggtcatttttgtttcgctaaaaacggccagtattccgcaattgctgacgatcattaaaagcgagcttcagcattgtatgacccccacggctaccgacgccgcaggccgggaactcagctgcgccagctgtccgcatcgcgtgttatcgcgatcgcagaccgccgtagtgcacggtattctcgaagggctggatatgagtaaaatcgccgccctgcagcgtgtgagtccccgcaccgccgcctatcataagaataagatcatggaaaaatacagcctgaataataatcatgaatttttccagtttatgaatcttttacgtgagcgctggtaggcaaacagcagcacaaaaaaataagatattgacctggctatattgtcgtaaatccgaaaatagtcgcaggatgctaaaaaatatccagcgctggcggacataacgttaaactctgacgcttcctcggtataaagacgttaccgcccgtctttatataataaaaaacacgctacacgaggaaaactgatacttcgtcacattgcccctgacgtgcctgtcaggggtctttttttccgtgtggaatagcgccctcagtgaaagggcgcggcaggatcaggcttccgctttctccacttcccagtccggctgcgcttcctcgtcggtcagcaacccttcatttttcgacagcatcgcggtggcgatgccattacccagcacgttgatggcggagcgccccatgtcgaggaaatggtcgatacccatcagcagcaggatcccggcgaccggtatattgaagctggggatcgtcgccgccagcaccaccagcgccgaacgcggcaccccggcgatacctttcgaggccagcatcagggtcagcatcatgaccgtaatctcgctaaagctcagcggcacgttataggcctgggcgataaacatcgcggcgaaggagcagtagaccatcgagcccacgaggttgaacgagtagccaatcggcaggacgaacgagacgatattgcgcgagcagccaaacttcaccagtcgctcgagggtcttcggataggccgcttccgagctgctggtggtgaaggccaccagcaccggatctttcagcatgttcagcaggcggaaaacctcttttttcagcaccatatagccgacggcaatcagcaccgagctggtcaacagcaccgccaggtagtagccgccgatgaacgaagcatagttgagcaggatccccagcccctgggaggcaatcaccgacgagatggcggcgaagatggccagcggcgcaacgtacatcacatagcccgtcaccttcagcataatgtgcgacaccacgttaagggccgccaccagcggagcattaaacttctcccccagcgacgcgccggcgatgccgaagaacatcgagaacaccacgatctgcaggatctcgttgttggccatcgcctcggtgatgctggtggggatggtgtgcgacaggaaccctttcaggctcatgccgctgaccgccaggccggtatccaccgcctctttcggcaccgccaggtttaacccggcgcccgggtgctggaaggtgacgatcaccagcccgacgagaatggataataccgaggaggtgatgaaccagaccatcgccttgccgcctacccggccgatggtcgccgtctcgccgaggcgcataatgccgaccgtcagggtgctgaacaccaacggcgcgatgaccattttgatcaaccgcagaaacagatcggtgagcagcgtaatgttgtccgcccaggcggagacggtggttggcgtcgcgtaggcatggatagccgcgccggagaggatccccatcagcataaaaatgacgatgaagagcgtgagtttgtttgcgtttgccacagcaatgacccctgattatttaacacgttgatttttaagtgcatattttattattatgagaatgcactgatttattcaccgcataaatctaattaaagcccccgcggatacaactattttttgcttttttaaactaaaagttgatatcaccccggatatcggccgcgggagcgcccggcgtcgcggcggttatccagacatttctcaaccttcttttcataattcctccatttttacggccccttccctcactaaactagtatcattcagcgaaacgcttcaggatgagaccgtaaactaatgaaaggcagtaacatacgtcgttggggcgccgcgctggcggtagtgattatcgccggggccgcctactggttctggcacgatcgcgggacgagcggcagcggggctcccgccgccggacagggcccgcaggggccgggcggcgcacgccatggccgctttggcgccgcgctggcgccggtgcaggcggccaccgccaccgaagaagcggtcccgcgctatctcaccgggctgggtacggtgacggcggccaacaccgtcaccgtccgcagccgggtcgacggccaactgctgagccttcacttccaggagggtcagcaggtcaaagccggcgacctgctggcgcagatcgaccccagccagtttaaagtcgctctcgcccaggcgcagggtcagctggcgaaagatcaggccacccttgccaacgcccgccgcgatctcgctcgttaccagcagctggtgaagaccaacctcgtctcccgccaggagctcgacactcagcagtcgctggtggtggaatccgccggcacggtgaaagctgatgaagcggccgtcgccagcgcccagctgcagctcgactggacccgcattaccgcgccaattgacggccgcgtcggcttaaagcaggtcgatatcggcaaccagatctccagcggggataccaccgggatcgtggtccttacccagacgcacccgatcgacgtggtctttaccctgccggaaagcagcatcgccacggtggtgcaggcgcaaaaagcgggcaaagcgctcagcgtcgaagcctgggatcgcaccaataagcagaaaatcagcgtcggcgagctgctgagcctcgacaaccagatcgatgcgaccaccgggaccatcaagctgaaggcgcgctttagcaatctggacgacgcgctgttccccaatcagttcgttaacgcccgcctgctggtggacacccagcagaacgcggtggtgatccctgccgccgcgctgcagatgggcaacgaagggcatttcgtatgggtgctgaacgatgagaataaggtcagcaaacacagcgtgacgcccggcatccaggacagccagaaagtagtcatcagcgccgggctttccgccggagatcgcgtggtcaccgacgggattgaccgcctgaccgagggggcgaaggtggaagttgtcaccgccagcagcggcgagcaggcgcagcccgccccgcgccagagcggtaaacacggagcgcgttcctgatgcaggtgttacccccaggccgcaccggcggcccgtcccggctgtttattatgcgtccggtggccaccactctgctgatggtggctatcctgctggccgggatcatcggctatcgctttctgccggtctccgccctgccggaggtcgattacccgaccattcaggtagtcaccctctatccgggtgccagcccggacgtggtgacctccgccatcaccgccccgctggagcgccagttcggccagatgtccggccttaagcagatgtcgtcgcaaagctccggcggcgcctcggtagtcacgctgcagttccagctgaccctgccgctggacgtcgccgagcaggaagtgcaggcggccattaacgccgccaccaacctgctgccgagcgatctgcccaacccgccggtctacagcaaggtgaacccggcggatccgccgatcatgactctcgccgtcacctcctccgccatcccgatgacccaggttgaggacatggtggagacccgggtggcgcagaagatctcccaggtttccggcgtcggtctggtgaccctcgccggcggccagcgcccggcggtgcgggtgaagcttaacgcccaggccatcgccgccctcggcctgaccagcgaaaccgtgcgcaccgctatcaccagcgccaacgttaactccgcgaaaggcagcctcgacggtccggcccgcgcggtgacgctttccgctaacgatcagatgcagtccgctgaggattatcgccggctgattatcgcttatcagaacggggcaccgatccggctcggcgatgtcgccagcgtcgaacaaggggccgaaaacagctggctcggggcgtgggccaaccagcagcgggccatcgtgatgaacgtccagcgccagccgggggccaacatcatcgacaccgccgacagcattcgccagatgctgccgcagctcaccgagagcctgccgaaatcggtgaaggtgcaggtcctctccgaccggaccaccaacatccgcgcctcggtgcgcgacacccagtttgagctgatgctggccatcgccctggtggtgatgatcatctacctgtttctgcgcaacgtgccggcgaccattattcccggcgtcgcggtgccgctgtcgctggtgggcactttcgcggtgatggtgttcctcgacttttcgatcaataacctgacgctgatggccctgaccatcgccaccggcttcgtggtggatgacgccatcgtggtgatcgagaacatctcgcgctatatcgaaaaaggcgagaagccgctggccgccgcgctgaagggcgcgggggagatcggcttcaccatcatctccctcaccttctcgctgatcgcggtgctgatcccgctgctgtttatgggcgatatcgtcggccgcctgttccgcgaattcgccgtcacccttgccgtcgctattcttatctcggcggtggtctccctgaccctgacgccgatgatgtgcgcccgcatgttaagccacgaatcgctgcgtaagcagaaccgattctcgcgggccagcgagcgtttcttcgaacgggtgatcgccgtctatggccgctggctgagccgggtgctgaatcatccgtggctgacgctcggcgtcgccctgagcaccctggcgctgtcgattatcctgtgggtctttatcccgaaaggctttttcccgatccaggataacggcattatccagggcaccctccaggcgccgcagtcggtctccttcgccagcatggccgagcgccagcggcaggtggccagtattatccttaaggatccggcggtggagagtctgacctccttcgtcggcgtcgacggcaccaacccggcgctgaacagcgcccgtctgcagatcaacctcaagccgctggacgaacgcgacgaccgcgtccagacggtgattagccgcctgcagcaggcggtggacggcgtccccggcgtggcgctctacctgcagccgacccaggacctgaccatcgacactacggtgagccgcacccagtaccagttcaccctgcaggcaaactccctcgaggcgctgagcacctgggtaccgccgctgctcagccgtctgcaggcccagccgcagctggccgacgtcagcagcgactggcaggacaaaggcctggccgcctatatcaaggtggatcgcgacagcgccagccgcctcggcatctcaatggccgatgtcgataacgcgctgtacaacgccttcggccagcggctgatctccactatttacactcaggcgaatcagtatcgcgtggtgctcgagcaggataccgaggcgacgccgggcctcgcggcgctggagaatatccgtctcaccagcagcgacggcggcatcgtgccgttgaccgccatcgccacggtggagcagcgctttaccccgctgtcggtgaaccacctcgatcagttcccggtgaccaccatctcgtttaacgtcccggacaactactcgctgggcgaagcggtggaggcgatcctcgccgccgaacagtcgctggatttcccgaccgatattcgcacccagttccagggcagctcgctggccttccagtcggcgctcggcagcaccgtctggctggtggtcgccgcggtggtggcgatgtatatcgtgctgggggtgctgtacgagagctttatccacccgatcacgattctctccaccctgcccaccgccggggtcggggcgctgctggcgctgtggctggcgggcagcgagctggacgtgatcgccatcatcggcatcattctgctgatcggcatcgtgaagaagaacgccatcatgatgatcgacttcgcgctggccgctgagcgcgagcagggcatgccgccgcgggaggcgatctaccaggcctgtctgctgcgttttcggccgatcctgatgactaccctcgccgccctgctcggcgccctgccgctgatgctgagcaccggcgtcggcgccgagctgcggcgtccgctggggatcggcatggtcggcggtctgatgctcagccaggtgctgaccctgttcaccaccccggtgatctatctgctgttcgaccgcctgtcgctgcacctgaagcgccgcttcccgcgtcaggaagaggaggcgtaagtgaagtttttcgccctcttcatttaccgcccggtggcgacgatcctcatctcgctggccatcaccctgtgcggcattctcggcttccggctgctgccggtggccccgctgccgcaggtggacttcccggtgatcatggttagcgcctcgctgccgggagcctcgccggagaccatggcctcgtcggtggccaccccgctggagcgctccctggggcggattgccggggtcaatgagatgacctcctccagctcgctcggcagcacccgcatcattctcgagtttaacttcgaccgcgatatcaacggcgcggcgcgcgacgttcaggcggcgatcaacgccgcgcaaagcctgctgccgagcggaatgcccagccggccgacctatcgcaaagccaatccgtcggatgcgccgatcatgatcctgacgctgacctcggacacctactcccagggtgagctgtatgatttcgcctccacccagctggcgcagaccatcgcgcagatcgacggcgtgggcgatgtcgacgtcggcggcagctccctgccggcggtgcgcgtcgacctcaacccgcaggcgctgtttaaccagggcgtgtcgctggacgcggtgcgcaccgccatcagcgacgccaacgtgcgcaaaccgcagggggcgctggaggacagcgcgcaccgctggcaggtgcagaccaacgatgagctgaagaccgccgccgactatcagccactgatcgtccactatcaaaatggcgccgcggtgcggctgggagatgtcgccaccgtctcggattcggtgcaggacgtacgcaacgccgggatgaccaacgccaaaccggcgatcctgctgatgatccgcaaactgccggaagccaatattatccagacggtggacagcatccgcgcccgcctgccggagctgcagcagaccattccggcggctatcgacctgcagatcgcccaggaccgctcgccgaccatccgcgcctcgctggaggaggtggagcagacgctggtgatttcggtggcgctggtgatcctcgtggtgttcctgttcctgcgctcggggcgcgccacgctgatcccggccgtcgccgtcccggtatccttaatcggcaccttcgccgcgatgtatttgtgcggcttcagcctcaataacctgtcgctgatggccctgaccatcgccaccggcttcgtggtggatgacgctatcgtggtgctggagaatatctcccgccatctggaggcggggatgaaaccgctgcaggcggcgctgcaggggagccgcgaggtcggctttaccgtgctgtcgatgagtctgtcgctggtggcggtgttcctgccgctgctgctgatgggcggcctgcccggccgcctgctgcgcgagttcgccgtcaccctgtcggtggcgatcggcatctcgctggcggtctccctcaccctgacgccgatgatgtgcggctggctgctgaaaagcggcaagccccaccagccgacgcgcaaccgcggctttggccgcctgctggtggccgtgcagggcggctatggtaaatcgttaaaatgggtgctgaagcatagccggctgaccggcctggtggtgctgggcaccatcgccctcagcgtttggctctacatttcgatcccgaaaaccttcttcccggagcaggacaccggggtgctgatgggcggcattcaggccgaccagagcatctccttccaggcgatgcgcggcaagctgcaggactttatgaagatcattcgcgaagatccggcggtggataacgtcaccggctttaccggcggctcgcgggtcaacagcgggatgatgtttatcaccctcaagccgcgcgaccagcgccacgagacggcgcagcaggtgatcgaccggctgcgcaaaaagctggccaacgagcccggggccaacctgttcctgatggcggtgcaggatatccgcgtcggcggccggcagtcgaacgccagctatcagtacaccctgctgtccgacgacctgtcggcgctgcgcgagtgggagccgaagatccgcaaagcgctggcggcgctgccggagctggcggacgtcaactcggatcagcaggacaatggcgccgaaatggacctggtctatgaccgggataccatgtcgcgcctcggcatcagcgtccaggacgccaacaacctgctgaacaacgcctttggccagcggcagatctctaccatctaccagccgctcaaccagtataaggtggtgatggaggtggatccggcctacacccaggacgtcagcgccctggataagatgttcgtcattaacagcgacggcaagccgatcccgctggcctacttcgccaaatggcagccggccaatgccccgctgtcggtgaaccaccaggggctgtcggcggcattcactatctcctttaacctgcccaccggccgctcgctgtcggaagccagcgaggccattgaccgcgcgatgacccagctcggggtgccgtcgagcgtgcgcggctcctttgccggtaccgctcaggtgttccagcagaccatgaacgcgcaggtgatcctgatcctcgcggctatcgccacggtctatatcgtgctgggggtgctatatgagagctatgtgcatcccttgaccatcctctcgacgctgccctccgccggggtgggcgctctgctggcgctggagatcttcgatgccccgttcagcctaatcgccctgattgggattatgttattaattggcatcgttaagaaaaacgccatcatgatggttgattttgccctggaggcgcagcgtaacggcaacctgacgccggaagaggcgattttccaggcctgcctgctgcgtttccggccgattatgatgaccaccctcgctgcgctgttcggcgccctgccgctggtgctctccgggggcgatggctctgagctgcgccagccgctggggatcaccatcgtcggcggtctggtgatgagccagctgttaacgctctacaccacgccggtggtctatcttttctttgaccgtctgcggctgcgtttttcgcgtcactcctctcaaccggtaagcgaataacatgacagacctcccggccagcgtgcgctggcagctatggatagtggcgttcggcttctttatgcagtcgctggacaccaccatcgttaacaccgccctcccctcgatggccaaaagcctcggggagagtccgctgcatatgcatatgattatcgtctcctatgtgttaacggtggcggtgatgctgccggccagcggctggctggccgaccgggtcggggtgcgcaatatcttcttcaccgccatcgtgctgtttaccgccggatcgctgttttgcgctcaggccagcaccctcgaccagctggtgatggcgcgggtgctgcagggggtcggcggcgcgatgatggtgccggtcggccgcctgacggtgatgaagatcgtcccgcgcgatcagtatatggcggcgatgaccttcgtcaccctgccgggccaggtcggtccgctgctcggcccggcgctgggcggggtgctggtggagtacgcctcctggcactggatcttccttatcaatatcccggtggggatcgtcggcgcgatcgccaccctctgtctgatgcccaactacaccatgcagacccggcgcttcgatctctccggctttctgctgctggccgccgggatggcgaccctgaccctggcgctcgacggccagaaagggctcggcatttcccctgcctggctggcggggctggtggccgtcggcctctgcgccctgctgctctacctgtggcacgcccgcggtaacgcccgggcgttgtttagccttaacctgtttcgcaaccgcaccttctctctcggcctcggcggcagcttcgccggacgcatcggcagcggcatgctgccgtttatgaccccggtgtttctgcagatcggcctcggcttctccccctttcacgccgggctgatgatgatcccgatggtgctcggcagcatgggcatgaagcggatcgtggtccaggtggtcaaccgctttggctaccgtcgggtgctggtcgccagcaccctgggcctggcggcggtcagcctgctgtttatgtttagcgccctggccggctggtattacgtgctgccgctggtcctgtttctgcaggggatgatcaacgccagccgcttctcctcgatgaataccctgacgctgaaagatctcccggacgatctggccagcagcggcaacagcctgctgtcgatggtgatgcagctgtcgatgagtatcggcgtgaccatcgccgggctgctgctggggctgtatggccagcagcatatgagcctcgacgccgccagcacccatcaggtctttctctacacctatctgagcatggcggcgatcatcgccctgccggcgctcatcttttcccgggtaccggatgacgtcggcagcaataccgtcctccgtcgacgcaacaggagtggatcgtgaaattttggcgcccgggtattaccggcaagcttttcctcgctatattcgccacctgcatcgtgctgctgatcagcatgcactgggcggtgcgcattagttttgaacgcgggtttatcgactatatcaagcgcggcaatgagcaacgcttaaccatgctcagcgacgcgctgagcgagcagtatgcccagcatggcagctgggcgtttctgcgcaataatgaccgctttatcttccagctactgcgcaccttcgaacgggataacgacgaccgctcgccgccggggcacgccatgaagccggacgccgccccggacgggccgccgccggatggcccccctgacggcccgcgcccgaggccggaaatgccgccccacggctggcgcaccatgttctgggtggtggatcagtcggggcgcgtgctggtggggccgcgtgagcgcgtcccggaggacggcacccagcgcagcatcgtggtcaacggcgcggaggtgggcaaagtgatcgcctcgccggtagagcggctgacgcgcaataccgacattaacttcgaccggcagcaaaagcgcaccagctggctgattgtcgcccttgccaccctgcttgccgcgctggccactttcccgttggcccgcggtctgctggcgccggtgaagcggctggtggaaggcacccataagctggcggcgggcgacttttccacccgcgtgacggtgaccggcggcgatgagctcggccgcctggcgcaggattttaaccagctcgccagcaccctggagcgcaaccagcagatgcgtcgcgatctgatggccgatatttcccatgagctgcgtaccccgctggcggtgctgcgcggcgagctggaggcgattcaggatggggtccggcgctttacccccgagtcgattccctctctgcaggccgaggtggctactctcaccaagctggtggacgacctccatcagctgtcgatgtccgacgagggggcgctggcctaccagaaaacctcactggatatcatcaccctgctggaagtggccgcgggcgcttttcgcgagcgcttcgccagccggcagctaagcattcaggtgtcgctcccggagcaggcgatgatcttcggcgaccgcgaccgcctgatgcagctcttcaacaatctgctggagaacagcctgcgctataccgacagcggcggcagcctgcacatcaccgcccgccgcagcggccggatgctggtgattgacttcgccgacagcgcccccggcgtcagcgatgagcagctggcccgcctgtgcgaacgcttttaccgggcggaaggatcgcgcaaccgcgccagcggcggctccggcctcgggctggcgatttgcctcaatatcgtagcggcccacggcggcaccctgcgtgccgaccattcgccttttggcggggttagcattaaagttgagttacctctggaacatgatttaccgagagacgtatgactgaattgcctgtagatgaaaacaccccacgcatccttatcgtggaagatgaaccgaagctcggccaactgctgattgattatctgcaggccgccggctatgcgcctgcgttgattaaccacggcgacaaggtcctgccctacgtccggcagacgccgccgcacctgatcctgctggatctgatgctgcccggtaccgacggtctgacgctgtgccgggaaattcgccgcttctccgatgttccggtggtgatggtgacggcgaaaatcgaagagatcgaccgtttgctggggctggaaataggcgccgacgactatatctgcaagccctacagcccgcgggaagtggtcgcccgggtaaaaaccatcctccgccgctgcaagccgcagcgcgatctgcaggcgctggacgcccagagcccgctgattgtcgacgaaggtcgttttcaggcctcctggcgcgacaagctgctggacctcactcccgccgagttccggctgctgaaaaccctctcccaggagccgggcaaagtgttctcccgtgaacagctactcaaccatctgtatgacgattatcgggtagtcaccgatcgcaccatcgacagccacatcaagaacctgcggcgcaagctggaggcgctggacgccgagcagtcgtttatccgcgcggtgtatggcgttggctaccgctgggaagcggacgcctgccggctggcgtagttagccttttcccggctcgcgctgcgcttcgccgggctacacgttcaccgccatctgcaatccgtagcccgggtaaggcgtttacgccgcaacccggggaactccctagagcctatcccaccaggcgttattaacgctgtcagtgtgagtactgcccaggttcaaaatggcaaacaaattagccatactgaaagatacctatctgatatttactccccttcgccgcggcgctacaatgcccgcccttaatgtggggacactccccaactcgccgcaccaggtgcggcgaatctgacctgtcatcagaacgagaacaccatgtttaaaccagaactcctctccccggcgggaacgctgaagaatatgcgttacgctttcgcctatggcgccgatgccgtctatgccggccagccgcgctactcgctgcgcgtgcgtaacaacgaattcaatcacgaaaatctgcagctcggcatcaatgaagcccacgcgctgggtaaaaaattctatgtggtggtcaacatcgccccgcataacgccaagctgaaaacgtttattcgcgatctgaagccggtggtggagatgggtccggacgcgctgatcatgtccgatccgggtttaatcatgctggtgcgggaacacttcccggagatgccgatccatctttcagtgcaggccaacgccgtcaactgggcgacggtcaaattctggcagcagatggggctcacccgcgtgatcctgtcgcgtgaactgtcgctggatgaaatcgaagagattcgccgccaggtgccggagatggagattgagattttcgtccacggcgcgctgtgtatggcctactccggccgctgcctgctctccgggtatatcaacaagcgcgacccgaaccaggggacctgcaccaacgcctgccgctgggaatacaacgtggcggaaggcaaagaggacgacgtcggcaacatcgtccacaaatatgagccgatcccggtgcagaccgtggagcctaccctcggcatcggcgcgccgaccgataaagtctttatgattgaggaagccaaacgtccgggcgaatacatgaccgcctttgaggacgaacacggcacctacatcatgaactcgaaagatctgcgggctatcgcccacgttgagcgtctgacccagatgggcgttcactcgctgaagatcgaaggccgcaccaaatctttctactactgcgcgcgcaccgctcaggtttaccgcaaggcgatcgacgatgccgccgccggcaaaccgttcgataccagcctgctggagaccctggaggggctggcccaccgcgggtacaccgaaggcttcctgcgccgccatacccatgacgattatcagaactacgagtacggctactccgtctccgagcgccagcagtttgtcggcgaattcaccggagagcgtaacggcccgctggcggccgtggcggtcaaaaataagttcagcgtcggcgacagccttgagctgatgaccccgcagggtaacgtcaacttcacccttgagcatatggagaatggcaaaggcgaaaccatgccggtggccccgggcgatggctataccgtctggttgcctgtgccggacgacctgcccctgcagtatgccctgctgatgcgcaactttactggtcaaacaaccagaaatccgcacggtaactagttaatttgcgttattttttcacgatgtaaggatattagaatcggatcacataccgtttcgatcgaaacaggtatcatccatttcgctgaaaaacataacccataaatgctagttgtaccaggaaccacctccttagcctgcgtaatctcccttacgcgggcttatttttttgcctctcctccggtcttcgctttcgtcatgcggtacactttatgcaacattgagcaataaaggttcccttgatgatgtctacgtttcctgccagcttactgatccttaacggcaaaggtgccaatgaaccgcagctacgcgaagcggttaacctgttacgcgatgaagggattgatattcacgtccgcgtgacctgggaaaagggcgatgccgctcggtttatcgatgaagccctgcagctgaacgttgaaacggtgatcgccggcggtggcgatggcaccattaatgaagtggcgaccgcgctggtggagcgcggcggcaagatggcgctagggattttaccgctgggcacggctaacgactttgccaccagcgtcggtattccgcaggatctggccagcgccctcaagctggcgatcgtcggccgcgatgtgccgatagatatcgcccgggtgaatgataaaaccggctttattaatatggcgaccggcgggttcggcacccggatcaccaccgaaacgccggaaaaactcaaggccgcgctcggcggtgtctcttatttaatccacggtctgatgcgcatggataccctgaagccggaccgctgcgagatccgcggggagaactttcactggcagggcgatgcgctggtcatcggcatcggcaacggccgccaggccggcggcggccagcagctgtgtccggaggcgttgattaacgatggtctgctgcatctgcgcattttcaccggcgaagagctgatccctgccctgttcagcaccctggcgaatccggaaaactcgcctaatattgttgacggtgtctcctcgtggtttgaaataaccgcgccccatgagatgacctttaacctcgacggcgagccgctcagcggcaaaaccttccgtatggagctgttaccggcggccctgcgctgccggctgccgcccgactgcccgctgctacgctgatcaggcttcgcaaagcaaagacggcgcccggctggtatacagcagccgggttcgttgattgagcctctgaatgttaaggtaaaacggcacctgcggctgcagggaaaaaacctgggcaggatatcgatccaaacaccgcgcttacattaatagacgatacccacaaccacaaaaaacctataacatcaaatagttatctattaaaatgggcgcatctgccgtgagacaatgcgccataaagcttagtattccgccacctcgcgcgccatttcgcgcgtatattgccgactggcgttaaccagcatctgcgtataggccatctgcgtataggccatctgcgcctggccgctgaccagcgcatcgaccgtcagggtttcgaggatcttcccgtactgcatcaccgccactttctggcataagtgggcaataaccccaagatcgtgggtgaccatcaggtaagtgagcttagcctcccgctgcaattctgccagcaggttaaggatctcagcctgcaccgacacatccagcgccgacgtcggctcatccagcagcagcacctgaggctcaagaatcagcgctctggctatcgccacgcgctgccgctgcccgccggagagctgatgcggatagcgctcgcgaaaggcgcggttgaggccaactttatccagcagcgcattgatccgccggtcgcggtcgttgatacgatggatctgcagcggctcttcgaggatatcgccaatggtgtgacggggatgcagcgatccgtaggggtcctgaaataccatctgcacctgacggcagcgctcgcggctaatttcatgccctaagggctgagcatcgatggtcagttccccctgccagtgggtaaacagccccgccaggcacttgagcaccgtcgttttaccggaaccggactctcctaccagaccgtagatctcgccgggcttaacgtggaaactgacgtcatacagcacctggttacgcttctccccctcgccaaacgcgaggttgagatgttgaacttcaatcattatccgctccttaatccgttaaccagctggcctgacgctgcagcaccggcagtatcgggcgacgatgctgcatatccggcagcgagttaatcaatccctgagtgtaggggtgacgggcgtgatcgagatctttagcggcgatggactccactacccgtccggcgtacatcaccagcacccggtcgcagaagctgcgcaccaggttgatatcgtggctgataaaaatcagccccagcccgcgcgactgaaccaggtcatccagcaggcccagcacctgcaggcgcaccgacacgtccagcgcggaggtgggctcatcggcaatgatcagttccgggtcggtaatcagcatcatggcgatcatgatgcgctgtccctgtccgccggatatttcatgcggataaagctgataaacgcgctccggctggcgaatacgcaccacctccagcatctccagcgccctggctttcgcctcatctttgcgcccgggatgatgagtaagccaggcctcggcgatttgcttacccacgcagaccaccggattcagcgaatatttcggatcctgcataatcatcgagatacgtttgccgcgtacgccgcgcatctgcgcttcgctaagatgctgcagatcgaggtcggcaaactgcatccggctggcgctgacgcgggcctttttcggatgcagctgcagcagcgcgcgcccaacggtggacttacccgaaccggactcgccgacaatagccagcttctcatgccccagctggaaggagacgccgcgcacggcgtgggtcaccgcgctaccgttaacaaagtcgacgcacaaatcgcgcacgtcgagcagcggtgcattattcactacggggatcgaggatgtcacgtaggccatctcctaagaagttgaacgctaagctattgatcagaatcgccagccccggaatggttacgacccaccagcactccatcatataagtgcgcccgctggagatcatcgctccccactccggctctggcggctgcgcgccgaggccgagaaagcctaggccggccgcggtcagaatgatcccggccatattcatggtgatacggataatgaccgagggcagacacagcggcacgatatggcgccagaggacgcgggccgatgaagcgccctgcagacgcacggcggagataaaatcagcctggcgcagagagagcgtttcggcgcgcgccagacgggcaatcggcggccaggcggtcagcgtgatggcgataaccacgtgctccagccccggtcctaaagcggcgacaaacgccagcgccaggaccagactcgggaaggagatgaaaatatcggtgacgcgcatcagcaccatatcgactttaccgccgaaatagccggcactgacgcccagcagcagtccgagcggaccgacggtcactgagaccagcagcacgatatagagcgtgatgcgggagccgtacaccaggcgactaaagatatcccggccaaactcatcggtgccgaaccagtgctgcgcattcggcgcgaccagcgcactattcaggtcctgtaccagcgggttataaggcgcaatcagcggcgcgaaaatcgccaccaccagcagcataaagataattcctccgccgatggccgtgagcggattgcgcgccattttgccgataaacccgacggcccgcgccgccgcgcgttgcagccgctgacggccttcgcccgcaccacccgaaagcggcgaatccagagaaacggtcatgattttgtcctcgggtcaaagaattgatacagcatgtcggagagcaggttgagcatcacgaagatcacccccaccagcagcacgcagcccatcaccgcattcatatcgcccagcagcaagcttccggtaaggtaggagccaaaccccggccatgagaagacagtttcaatcagcaccgcgccttccagcagcgcgccgtaggccagcgccaccaccgtcagcagttgcacgaggatgttacgaaacgcatggttccagataacctggcgctcggtcagccctttcacccgggcggtaataatgaactcctgcgacagctgggccagcataaagctgcgggtcatacggctgatataagccagcgagtgaaaacccagcagcgaggcgggaagaatcagatgattaatggcgttccagaacacctggccgttgccggccagcagcgcatcaacggtcatcagcccggtgcggcgcgacaccacaccatccagcccgagatctaccctcccggcgccgcctacccagccaagccaggcatagaacaccagcagccccatcatcccgacccaaaagatcggcgtcgagtagcccgccaggctgataatgcgtaccacataatcggagacgctattgcgccgcgccgccgccaacacgcccagcggaataccaagacccgcgccgacaataatcgccatcgttgccagctccatggtggccgggaagacgcggataatatcgtccactaccggtttcccggtcagcagcgcgttgcccagatcgccgtgcaacaggttgacgaaatagatgccaaactgggtggtcagcgatttatcaaaccccagctgctggtaaacctgctgataggtactctggtcagcatccgggccgacaatcgccagcaccgggtcgatgggcatgacgcggccaatggtaaaggtcagcagcagcaggccgaacagtgtaatcaccacctgcagtagccgttttgataagcgccggccgcgtgagccgggcgcaaggattgcggtactcatcctttctctccttcgcggactttatagacgtcacgcagaaaagtggtggcggaggggtgcggctgatactcccgtacctcgttgcgcacgacgaccgaatcaaccatctgcgaaagcggaattaaagccggaaccagctggtcgtagcgtgtctggatggcctggtagtcagccacctgtttttgcggatcgcgttccagcagggcctggtcaatcatcgtattcagttgcgggtcgtaaaaaccggtacgccagccctggaagttggtcaggcgcgccttatcgctgttatccgggttatagaccagcgcgcgcaggctggagtgcggatgcggctccatcccgctgccgccgcgacctaccagcaggtcaaatttacgctcgcgcattgcgccgtagatctggttaccagtgccggtgatgattttggcgttaatccccgcctgcatcagcgtcgactgcacggcgatagcgatgttaagaaatggctgatcggagagtacccgcagcgtggtatcaaagccgttgggatatcccgcttccgccagcagctttttcgcccgcgccacatccagcctgtagccgggatcgggtagcgtggacggcattcccgctttgataggccgctggtgcagcacgccgtagcccggcatcagcgctttattgataccctggtaatcaatcagatagcgcaccgcctcgcgcactttcggattggcgaagtgcgcctctttcatgctcatcgccacgtagtacatggtgccgcgctgcaccgcatcgacggtcagctgcggatcgctgcgcatggcgttgatatcggaaaccgccatattgttggcaatatcaaggtcgcctttttcgatcatcaggcgcagagtttgcgactcctggaaatgacgcagtaccacgcggctcattttcgcctcgccgcgccagtagtcagggttgcgcttcatgcgcagcacatctttcgcctgccaggtttcgaggataaacggcccggaaccggcttcatgggtggttagccagcggttaccccagtcgttatcctgctgatggctttgcaccgttttactgtccagcactccgaggttgcccagcgccgccagcgagtaaatcaccagctgcggatcgttatctttgggtaatacgatttgcaccgtgaagcggtccggcgcgctgacctggctgtcgatatttttcttactgaagccataggatttccatactgaggcctgggccaggttgaggtgcaggatgcgccgcattgaccacacgacgtcggcggcggtcagcgggttgccggagtgaaacttaacgtcatcgcgcagatgaaaggtcagggttttgccgtcggggctgatatcccaggatttcgccagcgcgggcctgacggtggtgagctgctcagggtcaagctccaccagcgagtcgtagaggttgaccacgatccccaccacttcgttaccggtcatcgccgccgggtcaagggtgagcaggttattcatattcatgccgatgatcagctggtcgggcggcgttttcgccaccgcctccccgctccccatcgatatggcgagcgcgagaatacacgctcccagtaaggaggtttgtttcatatctctgtttgcctgtactgtagggtacatgttgccggatggcggcattttcggcttatccggtctaccgggccgcaggctcgataagcgcagcgccatcgggtatttatttttttaaatcagtcgtggctaacggtattggcttcgatatacgcaaaattaatgtcttcaccgagacccggacgttgtgacaaatgcacaaatccctggtcatccatcgggtcgacaatgctgttgagataggccgccggttcatcgtagtcgaggaacggatgcagcaggccgcgctcgtaccagcggcagttgcggatcgcgcccaccaccgccaggcttgccgctccgttgccgtggacttcgcaatccatgccgaaagattccgccagcgccgccaccttcatggtcggtgtaatcccccccacgccgttagcgccggcgcgcagaatgtcgcaggccccggctttcacccattcggcgcgcatgtggtgcttgccgccgaagctctccggcccgacgatgggaatcgacaggttttccgccagccacgcataggaagacatcgaatcctcctccatcggctcttcaaaccaggcgaaattgagtttttccagctctttgccgatccacagcgcctcggcgcggctgtaccagtgatagccatcaatcatcaggtcaatatccggccctacggcttcgcgcaccgccgcgcaggctttaatgtccattttgggattgggcgcaaaagagattggcggcatccaggtgtgcagtttgatggccttgtagccgcgggcgaccagcttctcagcaaaagcggcatactcttccggggtcgacaggccgcccggcagatcgtcgccgcacatggtgctaccgtaagccgggacagtgtcgcgatagccgccgagcagcttataaaccggcatcttaaggctgcggccgatcaggtcccacagcgcctgttcaacaaacgacagcgcgcgctccgttagctgatgtgcgctgccgcgctgccagtggttaagatcctgccagatacgctcacggttaaacgggtcctgtcccaccagcactttgcgaaaaaaagtattcaccacgaacgggcgcacgacttccggaggcgcaaacgaaaagccctgcgccccatcatcagcggtgatggtcagcatcgccattttggccatgctttcaacccccggatgggagtgcccggcgctgtcggaaacccgacgagtgggatattggaaaacggtgacattcacagattcaattttcatgctcggtccttatcacggccaaatccgatcgacataagaaaatcggcaaagcggtttcacattattgaaagtacgtttcaatatataatctaagcacaacttcgtagtagtgcctcggacaaacaccgctaagcaaggccataaatttgggcattggcacaacaagacgtgactgttttcacaaaagatgagcgaaatgtgaggcagatcgaccaggagaaaaaagggcgtgagcgcagagaaaagattaaccgaccagctacatcccgggaatgtctgcgcccacaaatggctgacttaaaccgccgccgctggctccgcgctaagcgcttccagcagttcaggtaaggtttgatagcggccagcggcggcctgaaaacgcgcgtgctggctatcttctgcaatcactatcgtggcaatccccgccgactgggccgcgcaaaagccggtaaagctatcctcaatcaccagacactggctggcgttgagattgagcttccgcagcgtcgtgaggtacaccgccgggtgcggtttgccgcgtggttcatcatccgcgctggagatcgcgtcaaaaaagtgccagagcgaaagcttgttcagcacagcggcaataacctgacgagatgatgacgtggcgagcgcaatcttataacccgcttcgcgaaaatagcgtaacgcctcctgcaccccgcgcatcggttcgcctttcgcggcaatcaggcgggtgatgcgctgcaggatggcgtcttcaagccgctgcggagcgagatcaagctgaaaatagcggcaccaggtgccggcaatgtcgtcgaggcgcttgcccttggtcagggtttcacattcagcaacgctcgccgttgccccccactgcgcgagggcgtcaatctgcgcctgacgccacagcgcctcggaatcaataatcacgccatccatgtcaaaaataaccgcctgcatactcattcgttcacctcattaaggctggcatgaagcgcatgccagccgcagtacctatgagaattcaacctgctcgcgggcggttgcttccttgtgggagaaccccggctgctccacgcggataaaggcgcagaggaaaaaggccaccacgtacaatgcggtataggcgatcaccaccccgatggtgctgaagaacggcagcagcaccacggcaatagccggcgcgagaaagttcgacatccccgccgacaggttatagaccgaaatggccgcacctttatgcttcggctccagcgccgggaacacggccgccagcggcacgaaggcggcgacaaagatcccgagggcgatggcggggatcagcgccatcgcaaagctatggccaaagtgctgaggaatgtagtaaaacgccaggctggagagcgccatcccgatgcagccgaaccagcgcaccaccttcatccagccaagtttttccccgaggatcccccacagcacgttagagaaaatggtggtgaagaagaagactgcccatacctggagccattctgaagtgctgaagcccagctcatcgacaaacatcatcggcataatcaccgcaaagccgaacagcgagagggtattgatgatcctcaccatgctcgacagcagaatattgcggttggtatagagcagcgtcgcggcgcgtcccagctcggaaaacttctcacgggtggtgagattctgcatatgctgcggcgtttgaatatggcgcagggaaaccagggcaatcacgcccccggtaaggcagaaggccagcgccagccacagggtgcccatttcgccaatgtgcggaatggtaaagctcggaatatagctgccgaagaccccgatgccgatggaatacaccgcccagaaccagccgatggccgagctggcgttgtcgcttttgacgttatggacaatcgccacgataaacgagtagaggaacagcggataggcgaagccgcggatgccgtagaaaagcaggatcagcgcatagttggcgtgaccgaggccgaaaacgaggaacagcacgtggaatacgcaccacagcacgaagccaatcatcatcgttttcagcggggtgataatttccgccaccaccccggaaatccacgccgacagcgcggcggccaggccgtagagggtaaaggcaaaggaggcctccgccggagagaagccgagggctttgatatagtgcgacagaaaggctaattcaaaaccgtcgccggtcataaatacggcaatggcgatgtatccccagagcaggttcaggggtaaaccgagccactgtttattattgatagacataatgacctcgttttcagggtacagggtggccgctccgcgacgtgcaacgaagcggcggttatgatgaaaatcagtgctgtcgatatttaagatcgtttaaatacagggctttaaactgcgcgtagcgttgcatcagggtgtggtggcgaacaggatccgcacgccaggtctgccagacttccggtttttcacacaccgcggcaaccggtttgcccgccgccaggcaggccagccgcgccgcgcccagcgcgccgccggtctctccgcctttgtgggtcaccaccggcatagcgagaatatcggccagcagctgggcccagaacgggctgcgggcgccgccgcccaccagcgagcactgcgcgatcggcgtcccgctctcttttaacgcctgcaggccgtcgttgatcccaaagctcaccccctccagcaccgcgtagcctagctgcgcgcgcaggctggcatgggtcatgccccagaagatgccgcgcgcgtcaggatcgttatgcggggttcgttccccggagagatagggcaggaagaacggggcgttggctttatcctcctcgcttagctcggcaatctccgccagcagcgccacctccgtggtgccggtcaggcggcagaaccactgcaaacagctggcggcgctcagcatgacgctcatctggtgccacaggttcggcagcacgtgacaaaacgcatgtaccgccgactgcggcgccggacgataggcatcggtcaccacaaacagcaccccggaggtgccgagcgaaataaacgcatcccccggckagaccgcgccgacgccaatggcgctgaccgcgttatcccccccnnnnnggccaccaccaccgaggcgttcagcccccagcgcgcagccacctgcgggtcaagggtggcggaaacctcgcagccttcgaccagcgtcggcatttggctacgcgacaggccgcacttgtccagcagagcgtcggaccagtcgcgcttcgccacgtccagccacagcgtcccggcggcgtccgacatatcggagactttcttcccggtcatccggtagcgcagataatccttgggcaacagcaccgtggcggtgcgctgaaagtgctgcggctcatgacggcgcacccacaacagcttcggcgcggtaaagcccggcatcgccaggtttcccgccacctgatgcagctccggcgccatcgcctccagctcggcgcactctgcggcgcagcgggtgtcgttccacagaatggccggacggatcgcctccccctctgcatccagcaacaccgcgccgtgcatctgcccggagaggccaatcgccttaatggccggccaatgctgcgcgcatttttcccgtagcgtggccatcaggtactccgttgcctcccaccatagctccggcgcttgttctgaccagtgcggatgaggccgctgaatactcagcggcgcgctatggctggcgataacctcatggttctcatcaatgaccagcgctttgacttccgatgtgccgagatcgatacccagatacatagccacctcttagttaatcagcgtgtaaacggcggcgactttctcgcgcatcagcgccaggaaatccgcgttgttggcgagatcaccaaacagggctttatcacgggcgaagacagccaccggatcctgagcctcgaacatctcatgcaccgcctgcgcatccaggatgccgtcctggtactgatacggcagagttcccttgtgccactgctccataaagacgaagaacagcgccggcagcatggcggtcgcctcagggcggacgccgcgttggtagcactcctgcaaggttggcgcgatcatcgccggaattttcgagaagccgtcggcggcgacgcgctggttggtgtcctggatataggggttggtaaagcgcttaagcaccacatcccggtaggtcggcagatcaatgccgttgtcgccgagacacggaataacgtcctccgtaacgtagcggtcggcaatggcgtagataacatcggtcagcgtgctttcatgaatatactgctggccgattaaggttcccgcccaggcaatgcagctgtgcgacgagttcaaaatacggattttcgcctcttcatacgggatgaccgactccaccatctccacgccgaccgcctccagattcgggcgggcaacccggaagttgttctccactacccactggataaaggtctcccccatcaccggcgctttgtcatcaattccggtttgcgctttgatgcgggccggcagatcggccgccggacgcggggtgatgcggtccaccatggtgttcggacaggtggtgttggccgccatccagtcaatcaccgcctgtttgccggtgagctgcaggaactcgaccatgccgtcgtggaaacgctcgccgttatggcgcacgttatcgcagttgagcagggtcagcggcccggcgttgtcggccatgcgcttttccaggatccgcgcgagggtgccgtaaatggttttgcactcgccttgcaggtcggcctgcagatcggggttgctggtttccagccgatggcgagtgttcaggtagtaccccccttccgtcacggtaaaggcgataactttggtctgcgggtttgccccttcgttaatcagcggctgtagcccggcctgccacggcagcagtttctggattgaggtgatctcttcatatttgcgctccccttccgggctgacggtctcgaggacgtaacgtcctccctgcgccgccagcgcctgtaccacctgctcggcgtcgttgcgaatattccccgccgcgatgcgccagcgattatccccggaagcaatcagacgatgcagataccacgcctgatgcgcgcgatgaaaagaacccagaccgatatgaagccatgtgaattgattgttcatgttctgctctccttgagttgatggcgccactgtaattgatcatttgaccgaaataagagccatagatcacaaaagagcaattacccaattaaattacaaatgaccaacaaagagcaaaagcttgccagttatgccaaccacggcgagaatgcgggtattcgccgggccaattgcgtgccctggccagcaacttagggcgggaaaccatgagtaaagaagacgatatccggttggatcagaaggtgcgtgccgcatggatgtactacatcgccggccagaatcagagcgagattgccagccagctgggcacctccagaccggtggtgcaacggctgattgccgccgcgaaagaagaagggattgtgtcgattaatctgcaccatccggtagcgaactgcctcgattatgcgcagttgctgcaggaaaaataccgcttgatcgagtgcaatgtggtccccgcctttagcgaagaaagcaccctcgacagtgtgtcatttggctgctatcagctgatggctcgctatctgcaggatgataaagagaaaattatcggtctgggctcgggcctgaccctgaaaaaagcgctgcagcgcatcgattttgacagcctgaatacccgctgcgtggcgctgatcagtgccatgaacgccgacgggcagtgcaattattacgatgacgtgcccctgctgctgacccgcaaaattaaggccaagtactatcagtggccggcgccgcgctacgcccaaagcgcggatgagtatgaaatgtggtgcaccaatcgcctattccgcagcgtctccagcgtcgcccgcgaggcggacgtgatttttgtcggcattggtccgctgggcacgcaaagtccgatctttaaagacgggtttatcaatcaggcgcagatggatgagctgaccgcccgcggcggcatcggggagatcctcgggcggtttattgatgcgcaaggcgacgtggtagacagcgagatcaaccgcatgatcaccagctatgatatccgccagagccactgcccgcggattgccgctgcctgtggagaacataaacgaccggcgatcctggccgcccttaaaggcggctggattaatggcctggtgaccgatgagcataccgcccgctggctgctgacgcggtaacgtcgaacagccagacagcgactcagctgctgctcatcagtcgcgggggaatttcaatccgctgctggctggcttcgccggcgtcaataatcgaaaaaacagcgtccagcatcgccggcacgtcctgctgcaccatgtcgatatcgtgccccagcagatagacaaacggatcccagtcgaagcagcccatcggcggctgctcgctgccggtcagacccacctgcgacagccagcgcacaaccccttccagggatatcgtcgagttaacaaatatcccctgcaacaacgtcttcgcgctgccaaaccgctcctgcaggcagtcctcaacgtggcctttcgaatagccgggagccagaatattctcctgcggcacgctaagccccagctcgcgatgcgcatcgtggaagccgcgtaaacgctcgctggtgttatggtcgctgctgcgcccgccgataaaggtcagcggcgccagctctccgcggcggcgggcgctattagccaggatcttatgagtcagcgctttcgcgccgccgtagttatccgaaatcaccgacggcgagagagagcccggcaggtcgagattgaccgttggcacgcccgcctgctggcatagcgcggaaattttatccggattggtcgccccggtcgcgaccacccagtcaacctgccaggagagcatcgcctttaccgcctcgatctccagttccggacgccggcgcgtacaggtgataatcggcagcaggccgcgctcgcgggccatctcctcaaagcgttcggcgatggaaccgaagtagcggttatcatatttggggataatcataccgatgacgtgtgattttttactgcgcagcatgctggcctgacggttaatcgcatagccctgctcctcggcaatccgcgtcaccttttccgcaagcttggcgctgatgcggcgctttttccagttaccgttgaggatagcgctcaccgcgctcgccgaaacgccggaaagttccgccaggtcgtaaatcgttatcttcttcatttttccaacttgcgtcacaaaatcatgtcgctgttaatttccccacttgctcaatcgatgaagcgagagcaacatagcttcatcgattgagcatccttttcacgccaggaagtacgcgcgcataccgcctcaacatgccagcaagcctgaattaagatgctgatattcaatatgttaccaggtttagtctatcacctcgaacgtgatgccctcgcgttcgatagttttaaccagacacggcaaaggattataaaatgaaccactctgtctcctctatgaatacttccctcagcggtaaagtcgccgcgatcaccggcgcggcgtccggtatcggcctcgagtgcgcgaggaccctgctgggagctggcgcaaaagtggtactgatcgaccgcgaaggcgaaaagctcaacaaactggtcgccgaacttggcgaaaacgccttcgccctgcaggtcgacctgatgcaggcggaccaggtcgataacctactgcagggcattttgcagcttaccgggcgtctcgatatcttccacgccaacgccggcgcctatatcggcgggccggtggccgagggcgacccggacgtctgggaccgcgtgctgcaccttaatatcaacgccgccttccgctgcgtgcgcagcgtcctgccgcatctgatcgcgcaaaaatccggggatattatcttcaccagctcgatcgcgggcgtggtgccggtgatctgggagcctgtctataccgcgtcgaaattcgcggtgcaggcatttgtacacaccactcgtcgccaggtggcgcagtatggcgtgcgcgtcggcgccgtactgccgggcccggtggttaccgctctgctggacgactggccaaaagccaaaatggacgaagcgctggccaacggcagcctgatgcagccgattgaagtggcggagtcggtgctgtttatggtgacgcgttcgaaaaacgtcaccgtgcgcgacattgtgatcctgccgaacagcgtggatctctgaccctggccagcctatgagaggatgtgatgcaaaacgatacgcaaaacattattggcgtggatgtcggttcgggcagcgtgcgcgccggggtattcaatctgcggggcgagctcctcgcccacgcgacccgggaaataaccctgtttcgcagcgccggaaacaaggtcgagcagtcgagccgtgagatctggcaggcggtgtgctactgcattaaaacggcggtggccagcgccggcgtttcgccgtcgtcgatcgccgggatcggcttcgatgccacctgctcgctggtggtgattggcgataacgatgcgccgctggcggtcgggccttcggacgatgcggaccgcaacattattgtctggatggatcatcgcgccaccgggcaggcggaaaagatcaatgccacgggccacccggtactacggtacgttggcggcaaaatctcgccggagatgcaaacgccgaaaattttgtggctgaaggagaatcgcccgcacatctatcagcaggcgcgccacttcttcgacctcgccgattacctcacctggcgctcaaccggcgatgaagcccgctcggtctgcacggtgacctgtaaatggacctatctggcgcatgaacaacgctgggatgccggttacttccgccagattggcctcgaagagctggcggatgaagattttgtccgcatcggccagcggattgtcgatccaggcaccccctgcggcgagggcctttgcgccacggcggcagaggagatgggcctgccgatcggcacgccggtggcggtggggatgattgacgcccacgcgggcggcatcggtaccgtcggcgtgcttaacggcgcggtcaacaatatggcctatgtcttcggcacttcttcctgcaccatgaccaccactcaggaagcggtattcgtcccgggcgtctggggcccttactattcggcgatggtgccgggctactggctaagtgaaggcgggcaaagcgccgccggcgcggctatcgaccagctgctgagcttccatccggcggcggcggaagcgcgcgagcaagcgaaagccgcaggcgtccctctaccggtctggctggcggatcgcgttctgacgcaagttgcttccccttctgaggcggtaacgctggccgccggtctgcacgtcgttccggagtttctcggtaatcgcgcgccgcttgccgatccccacgcgaaagcgctgattgccgggctggggatggagcgggacctggataacctgaccgcgctgtacgttgccgggctatgcgggattggctatggtctgcgacagatcattgacgcccagcgcgcctgcggaattgagagtgaaaatatcgtcatcagcggcggcgccgggcagcatccgctggtgcgtcagctgttggccgacgcctgcggcgttagcgtcgtgagcaccgccagccgcgagccggtgctgttaggttccgccatcctcggcgcggtggcgggcagagtcgcggcttcgctgccggaggccatgaagcagtttactcaggtggatgccacctatcacagcgagactgcgtttagcccgcttcatcagcgcaggtatgcggcctataaggcgctacaacaggccggcaggctgattcgcgaataacatacctccttattttataacaataatgctccgctgctgtgcagcggagacactcatctgcactctgaaatcgaggtcaacatgtccgttaataacaaacagtggtacggtctaccgctcaacctcatctggggatatgtcgccatcgccgtgtttatgaccggcgacggctttgagctggcttttctgtcgcactacatcaaagcactcggattcaccccggcgcaggcttcctttgcctttactctctacggtctggctgccgccctgtcggcgtgggtctccggcgtggtggcggaaatcattaccccacgtaaagccatgctgattggcttcgtgctgtggtgtgtgttccacgtactgttcctcgtcttcggcctcggtcgcgccaactatgcgctgatcctgctgttttatggcatccgcggcctggcctacccactgttcctctactcctttatcgtcgccattatccacaacgtccgcagcgacagttccagctccgcgctgggctggttctgggcggtctactcggtgggtatcggcgtgttcggcagctatattccgagctttaccattccccacattggcgaaatgggcaccctgtggctggcgctgctcttttgcgccaccggcggcattattgcgctggtgtcgatgcgtcataccgaaacgccgcgccatatgcagaacctgaccactcgtgaaaaattcgccgaactggggcgcgcggcgacgctgctctataccaaccgcagcattctgttctcgagcattgtgcgcattatcaacaccctgtcgctgtttggttttgcggtgatcatgccgatgatgtttgttgatgagctgggatttaccacctcggaatggctgcaggtatgggcggcattcttcttcaccacgatcttttcgaacgttttctgggggattgtggcggagaaaatgggctggatgaaggttatccgctggttcggctgcatcgggatggcgctttccaccctggcgttctattacctaccccagcacttcggccataattttgccatggcgctggtaccggctattgccctggggatttttgtcgccgcgtttgtgccgatggcggcggtgttcccggcgctggagccgaagcataaaggcgctgcgatttcggtctataacctgtcagccgggctgtcgaactttctggcgccggcgattgccgtggtactgctgccctatttcagcactatcggcgtggtaatagcctataccgccttatatattctggccttcttcctgtgcccgttaatccgcgttgaacagcctggctttaccagcgatcagcatgcgaaaccgtttaccgccaacgcggcagagtcttaataaaccgcatctggtacaaacaacgagcaatccgggcggtgccgcccggatttttgccttatgcgatagtcactttgccatccagataaacatcctgcacggcattgatcagcttcacgccgtcggccatcgatttcttaaacgctttgcggccaaggatcagccccatgccgccggcgcgtttattgatcaccgccgtgcgcaccgcgtcggcaaggtcggtctccccgcccgccgcgccgccggagttgatcagcccggcgcggcccatatagcagttggccagctggtagcgcaccagatcgatggggttatcgctggtcagtttgctgtacacccggtcgtcggtatagccgaagttaaccgctttgtagccgccgttattctccgccatcttttgcttaacgatatcggcgccgatggtggccgccaggtggttggcctgaccggtcaggtcagcggaaacatgatagtcgacgccgtctttcttgaacgccgaattgcgcagataggcccacagcacggtgaccaggcccagctcatgggcccgctcaaaggcggcggaaatctcttctatctgacgacgcgattgttctgagccgaaatagatcgtcgctcccacggccaccgcccccatattaaacgcctgctcaacgctggcgtagagggtctggtcgtattcggtggggtagctcagcgtttcgttatggttgagcttcaccaggaaagggatgcgatgcgcgtagcggcgcgacaccgaggccagcacgccgtaggtcgacgccacgcagttacagccggcttcgatcgccagctcgacgatatttttcggatcaaagtacagcgggttggcggcaaaggaggcgcccgccgagtgctccacgccctggtcaaccggcagaatggaaaggtagccggttccccccaggcgtccggtattgtacagggtctgcatattgcgtagcaccgccggtggtcggttgttatccaccatcacccgatcaacataatctgcgccaggcagatacagctggtcggacggaatggttatacaacggtgctgcaacaggctctcggcatctttgcccagcaactgcgtaatatcagtcatagcaatctcccgtaaggccggccgaagccggcatgcattatcccaacccaatttttttgggcaggttaagcctggtaccgacttagcctattttccagccggggggccattttttcaggagattctgctgtcccgttgcgctgccatttaccaccaggcgtggaaatggtgcaccggcccgataccgtggcccacctccagagagtcggcctgcgccagagccgccgacagccaggccttcgcctcggtaacggtggccgcccagtccgcgtgacgcgggcgcagcgccgccagcgcggcggagagcgtacagccggtgccgtgggtatttttggtctgcactcgcggcgcggtgaaccgctgttccccttcgcgggtgaagagccagtccgggctttcggcatcgtcgagatggccgcccttcatcaataccgcgccgcagcccagcgccagcagcgcccgcccctgctccagcatttctcgttcgttacgcgcatggggggcatcgagtagcgcggccgcttccggcaggttcggggtgatcaatgacacctgcggcaacaatcgttgacgcagggtctccaccgccgaggccgacagcagcggatcgccgcttttcgccagcatgacggtatccagcaccacgttggccacccggtagcgcgccagccgctcggccacggcttccacaatatcggtctccgccagcatgccgattttggtggtatcgatacgcacatcgctgaacaccgagtcgagctgcgcggccacaaaatccggttcgatgcgatagaccgactgtacgccgcgggtattctgcgccaccagggcggtgatcgccgagcagccataggcccccagcgcggagaaggttttcagatcggcctggataccggccccgccgctgggatcggtgccggcgatggtcagggcgttgatgcgtttcatccctgcacctcctgatacagcgcgtcgagaaacgccggaataaagctgcctgggcctccctgacgggcggcgatctccccggcctgcttcatcagcccgcaggcggcggccacgttttccagccggtctcccggcagcgccgcgctcgccgccaccaccgccgacagcgcgcagccggtgcccaccacccgggtcatcagcggattgcctcccgccacgctgagcacccgctcgccgtcggtgacgtaatccacctcgccagtgaccgccaccacggtagccagccgacgagccagcgcctgggccgccggcagcgccgcggcggccgtatcggtggtatccaccccgcgcccgccggcgctcatcccggccagcgccagaatttcagaggcattgccgcgaatggccgccggctggaaggccagcagctcgtgacaaaaggccgtgcgcacggtcagggcgccgaccgccaccggatccagcgtccagggcttgccggcctgacgggcgtgctccaccgcggcgcgcatcgccacggcgcgatcttcggtcagggtaccgacgttaattaacagcgcatcggcgatagcggcaaactgcgccgcttcgcggggatcgatcaccatcgccggcgaggcgccgacggccagcagaacgttggcggtaaaggtctgcaccacgtcattggtcatgcagtgcacaagggggaatgggcgcgcagcagatggcgcaggtgcgcgacaggcgcgggattcaacagctcaggcatagtttgctcccgccagacgaggtagaagcaatgaccctgcggtctctgacttccctacgctggcattatccagatcaggtggtacgggtatttctcagccttcaacgaagaagggcaccccgagtcaaaatagtgaaattgttaagcgttgtggaatttaccgcaactcaccggttcatacaacaagcctttagccctggatacgacaccttcgcggccatcatgctcatcaggcgaccgggcgggattgcattccgctgctggcgggcggaaaataatgacatcatgcgctatttagcctaccgaggatatacgccatggccgtttatcaccatgcgctggtactgattaacagcagtcaggacggcgtcccgctgctccagcatgccgccagaatggcagaagagaacggcatgcgcatcaccatcgcccacatcagcaccgattaccgggcgctgaactatgtttccgacagcctgcgcgacgatcaggtctcgcaggaggtgatccaggccaaagccctgctcaacgagctggcctgcaccgtctccctgccggtggataccctctcgctggtgaccacccgccggtttgaagacgtggaaacctgcgttcggcagcggcagatcgatttaattattgccgggcaccataaccggctgctgggcgtcctctcctcacactcgctggagtacatcaaccacttaaacctggacgtgctgatcaagcacctgccctagcgcaaggcggcctgcagcagagaaaaacagtcttcaataagcgggggcagcgcctgcgggccgcgcatcagggccactgtgcgggcaagcgccggctgctgcagctgggcgaccctgagcgccgggtcctgcagatgggtggtgtacagcgccggcagaatcgccaccgctaagcgcgagcgcaccagaccatacagggtttcgatatagtccacctggtagcgggtggtcagcgtcaggcgatggctctccactaatgccgccaccagccgctggatattgcccttcgagaacacagcaatatcccgccccaccagctgtttccacggcagatgcgcctgcgcggccagcggatcgtcgcggtgcagcaccgccacgaagggatcttcgcgcagcggatagaccagcagttctgcgggcagtgagctgtcgatcgccccgatgccgaaatcaatctcgccgcgctgcagcgcctggataagcgcatcgttggtctgatcgtgaaattcaatgcgcagacgcggaaaggcctcagccagggtctgcggcagcagcggaaacagcagcgaactgaccgacggcaccagaccgatacgcaccgtcccgtcgccacccgcctcgacaatctgctgcatatcggaaaaggccgcctgcgccacgctgaggatccgctgggcgtggggtaaaatcgccgcccccagttcagtcagagtgaccgtcgcagcggtacggttgaccagtttgccgccgagtaccgtttcaatctgccgcagggcgctgctcagcgccggctggctaatcgccaggcgactggcggtatcggtaaaatggcgcagctgggccagggtgacaaaatactgaagctgtttaagagagagcgcgggcagccgctgccagggttcgttcatcatcgggttcgctacggtggtcctgcacaataacccgagcttatcgggtgataaatttattcatctgggcaaacgtttgctgtgcccctagagtatccgcattatccttgtgccggagtggttatgtccagcaatgctcaagtccgccgtcgcgccgtgcaggccgcgcgcggtgaatccccgtttgatctgctgctgatcgatgcgcagatcgtcgatatggccacgggcgaaattcgccccgctgacgtcggtatcgtcggcgagatgatcgccagcgtccacccgcgcggcagtcgcgaagacgcccatgaagtgcgttccctggccggtggctacctgtcccccggcctgatggacacccacgtgcacctcgaaagctcgcacctgccaccggagcgctatgcggaaatcgtcctcacccagggcaccaccgcggtgttctgggatccgcatgagctggccaacgtcctcggcgtcgctggcgtgcgctatgcggtggacgccagccgccatctgccgctgcaggtgatggtcgccgccccgtccagcgtcccctccacgccgggtctcgaaatgtccggcgccgatttcgccggcgcggagatggagaccatgctcggctggccggaagtgcgcggcgtggcggaggtgatggatatgcacggcgtgctgcacggtagcgagcggatgcaggagattgtccaggccggtctcaacagcggcaaactgattgaaggccacgcccgcggcctgagcggcgctgacctgcaggcctacctcgccgccggcgtcacctccgatcacgaactgacctcggcggacgacgcgctggaaaaactgcgcgccgggctgacgatcgagatccgcggctcgcacccctatctgctgccggatatcgtcgcggcgttaaaaacgctgccgcacctctcctcgcagatcaccgtctgcaccgatgacgtgccgccggatatgctgctggagaaaggcggcatcatcgccctgcttaatctgctgatcgagcacggtttaccggcggtcgatgcgctgcgattcgccaccctcaacgccgctattcgcctgcagcgccacgatctcgggctgattgccgccgggcggcgcgccgatctggtggtgtttgattccctggagaaactggtggcccgcgaagtctacgtaggcggtaagctgctggcccgcgcgggcaacctgctgagaccgatcgcgcccgccgcgggcgtcacgccgccgcgcgatactttgcagatcgctcccctccgcgccgatgactttattctgcgcgtccagggcattcgtcacggcatcgcccgcctgcgccatatccgcggcgcgcgcttcacccagtggggcgaagtggaagtgcaggttcgtgacgggaaagtccagctacccgccggcttcagtctgatctgggtcaagcaccgccacggccgccatcaggcgacgccgcaaatcgccctgcttgaaggctggggtgagctgcgcggcgccatcgccaccagctactcccacgactcgcataatctggtggtgctcgggcgcgacgctaatgatatggcgctggcggccaaccagcttatcgcctccggcggcgggatggcgctggcgcaacagggcgagatcctcgcccatgtggcgatgccgattgccggcatgctgtcggatctcccggccgcggaactggcgcgtcagttccgcgagctgcgcgatctgagcagccaagtcgccgactgggagccgccgtaccgggtcttcaaggccattgaaggcacctgccttgcctgtaacgccgggccgcatttaaccgatttgggtctgaccgacggcggcagccgccagatagtcgacccgttgatagcctgccgggagatcccggagccaaccgatcacaacaataatcctcagggagcctgagcatggccgataacacacttcactcttccgcccgcgctaactggctggagcgccgctttgcgctgcgctcgcgcggcggcacgctacgcaccgaatgcctggccgggatcaccggctttctcgccgccgcctatttactggtggttatcccggggctgctggcgatcggcgggatggataaaggcgccgccaccaccggcaccattctggtcttcgtcgtcggttcgctgctgatggcgttttatgccaacctgccgtttatcgtcggcccgggcattggcggctcggtgctggtgggtgtgacgctggccggtagcgaagggattggctggcagactggcctcggaattgcctgctggtcggggatcctcttcttcctgctgacccgctttggcctgcgcgaagtggtcacccgctcggtgccgcagtcgatcaagctgggattgacggcctccatcggcctgtttgtcgccgtgctcggttttcgcaatgccgggctggtgctggccaatgcgaaaaccaacgcgctgatgctcggcgactttctcgcccccggcgcgctggtggcgctgtgcggcctgttcctggcgatagccctgcaggcgcgtaaggttccgggcgccattttgtgggccattctgtgcgctaccctggtgggtatcccgttcggcgtgactaaactgccgacgcattttatcgatgccccccactcgctggcgccggtgctgggacaggttgacctgctgggggcgttaaacatcgccttcctgccgttcctgttcgtctttttcgcatctgagtttttctccactatggggacaacgctggcggtgggcggcgaggcgggtctgctggatgaagaaggcaacatgccgcagattaatcgcccgttcatggtcgattcgattgccgccgcgctcggcccgtgggtgggcattccggcggcgacggcgctgattgaatcttcggcggcagcggaagcgggcggcaaaaccggcctcaccgcgctgtcggcggcggtaatgttcctgctgatgctgctgttcacgccggtggcgttgatgatcccgaaagaagccaccgccccggcgctgatcctgattggcctgaacatgttcagcggcctgcgcaaagtggatcttgccaacttcaccgacgggctgccggtgctgatgatggtgatgatcacccttatcgccaacagctttggcaccgggattgccggcgggctgctgttttacattgtgatcaaggctatcgccggtaagtggcgggagatcccgattggcctgtgggtattggccgtcccgctggtgtattacttcgcgaccttagtcaggcattaagcccttcacaatgtgatttcacctcttcatataacaaacgcaccgcggcagagagctgtttgcggtgcggacaaatcagattcaacggcactacatccccctgataacgcggcagcaggcgccgcaggcgccccgcccgcagatcgtcgctgacgtcgagcatcgatttataggcaatgccctccccggcgatcgccagccgacggatcacctcggcgtcgtcgctcatcaccgtgccggaaaccttctgctgctgaaccacgccgtcgaggctcagcgaccagcggtcgaacggacggccgcgcaaaatgtagatcaacgcattgtgctggctgagttcctcgagggtctgcggttcgccatggcgggcgatccactcaggcgaggccaccagcacccgacgattttccggcgccaccggcagcgagataaacgaggcatcgtcgttattgccatagcgaaacgcaacgtccaccggatctttaaacacgtcggtcagctgatcggaaaagagcagccgcaggcgcagcgccgggtggcgttggcggaaatcgcggaacagggtcaggagcaggttacgcccgaggtccgacggcacggcaatctgcaacatgccgcgaacttcatcatccggggtctggatcttctgcagaccggcctcgagggtatcgagcatctgggtggcgtagggcagccaggtctccccctccggcgtcaggcgcaggctgcgggtcgaacgggcaaacaggcgaatattgaggatcgtctccagacgcttaattgccgcgctgacctgcgccggctgctgcccggcctcgcgcgccgcgtcgctaaaactgcccagcgccgcggcgcggacaaataaggtcagatcttccagcctgaacatgccgattctcccctgcttcagattgctcccaaaatacgcatcaccgtcgctgcaacgcaagcggcacaagacttgcgccgcgttttgcttacactttttaaaaatccagtgcttgccatttcagcaacgcatcaggaatgatacgaggctgctattttgagtccaggtaatattgaggaaactatgcgtaaaacaaaaatgatgcttctgggcgtacttcttgccaccgctggcgccagctggacggctactgccgcggggatcgatcagtatgcgctgaaagagttcaccgccgatttcacccagtttcacatcggcgacaccgttccggcgatgtatctcaccccggaatacaacatcaaacagtggcagcagcgtaacctgcctgcgccggacgccggcagccactggacctatatgggcggtaactacgtgctgatcaccgataccgaaggcaaaatcctcaaagtgtacgatggcgagatcttctatcaccgctgatccgcgcaatctccacgtccgccccagcgagccagcggactctccggcgctgcgccagatcttcctgcgggcgcgcagtttatcgtggacctggcttcccgccgcggcgtggcggctggaggatttcgatgccgccaccgcggatgaacagctgtgggtcgcggaatgcgacggccagccggtgggctttgccgccgtatggaccgccgataatttccttcaccatctgtttgtcgaccccgactggcagggcaaacatatcggcagcgcgctgctggcgcaggtcgaacggacctttaccgccagcggaacgctgaagtgcctgatggaaaataaaaacgccctgcgcttctaccagcgtcatggctggaccatcgaagcacagggcgcgtcgcccaagggcagatactggctgatgcgctcgccgcggccttaaacggcgcggaaggcaatctcacccgggatcacttctccctgccagtacatctgggccgccacccggcccgccagctggcggtagatgtcggtaaattcgctgtccggacgcgccaccaccgtcggcgtgccgttatccagatcttcccgcagcgtaatatgcagcggcagctggcccagcagctgggtgtggtatttctcggccagtttttgcgcaccgccggtgccgaagataggctcgtggtgcccgcagttgctgcagatatgcatgctcatgttttccacgatccccagcaccggcacttccactttctcgaacatcacgatgccttttttggcgtcgatcagcgcgatgtcctgcggcgtggtgaccaccaccgcgccggtcaccggaatgttctgcgccagggtcagctggatgtcgccggtgcccggcggcatatccagcaccaggtaatcaagatccggccacagcgtctcctgcagcatctgcatcagcgccttgctggccatcggcccacgccagaccatggcgttgtcgtcggtcaccaggtagccgatggagttggttgccagaccatatttcatgatcggcgccatatgagtgccgtccggcgaggtcgggcggctgtcttccgcacccagcatggtcggaatcgacggaccatagatatcggcatccagaatgcccaccttcgccccttccgccgccagggccagcgccaggtttacggcagtagaagatttaccgacgccgcctttgccggagctgatggcgataatgtttttcacgccgttgaccccgggctggtttttcacccgcttgagggtcgcgatgctgtgggtcagcttccagtcgatggccttcgcgccggtgatgcgcagcagttcggcactgcactgctctttcagcgcttcgaaagcgctgctccagacgaacggcatttgcagttcaatatggacggtatcgtccagccaggcgacatggtgcagcgccttaagggcggtgagattatgcttcagggttgggtgctggaaattggccagcgtcccggcgaccatcgcacgtaggcgctcaggggatttggcctgggattgcgaattcatcccgactcctttgttgttttgagatgctttcagtaatcacagagtttatcacaggtaacgattatccatatatgggcagccatttatggcgcacccacagcccttttggtaatatcggaagccctttttacaacagaagatgtaatgctcactatgactcaagtcgcgaagaaaattctggtaacgtgcgccctgccgtacgccaacggctccatccacctcggccacatgctggagcacatccaggctgatgtctgggtccgttaccagcgaatgcgcggccacgaggtcaacttcatctgcgccgacgacgcccacggcacgccgatcatgctcaaagcgcagcagctcggtatcacaccggagcagatgattggcgaaatgagtcaggagcatcagaccgatttcgccggcttcgacatcagctatgataactatcactcgacgcacagcgacgagaaccgcgagctgtcggagcttatctacacccgcctgaaagagaacggttttattaaaaaccgcaccatctctcagctctacgatccggaaaaaggcatgttcctgccggaccgttttgtgaaaggcacctgtccgaagtgcaaatctccggaccagtatggcgataactgcgaagtgtgcggcgcgacctacagccctaccgagcttatcgacccgaaatcggtggtctccggcgccacgccggtgatgcgtgactccgagcactttttcttcgacctgccgtcgttcagcgaaatgctgcaggcgtggacccgcagcggcgccctgcaggagcaggtcgcgaacaagatgcaggagtggttcgaatccggcctgcagcagtgggacatctcccgcgatgcgccgtacttcggcttcgaaattcccaacgcgccgggcaaatatttctacgtctggctggacgcgccgatcggctacatgggctccttcaagaacctgtgcgacaagcgcggcgacaccaccagcttcgacgaatactggaagaaagattccacggccgagctgtatcactttatcggcaaagacattgtctacttccacagcctgttctggccggcgatgctggaaggcagcaacttccgtaagccgactaacctgttcgtgcacggctacgtgacggttaacggcgccaagatgtccaagtcgcgcggcacctttatcaaggccagcacctggttaaatcatttcgatgccgacagcctgcgctactactacaccgccaagctctcttcacgcatcgatgacatcgacctgaacctggaagatttcgtgcagcgcgtgaacgccgacatcgtcaacaaggtggttaacctcgcctcacgcaacgccggctttatcagcaagcgtttcgacggcgtgctggccgctgagctggccgacccggcgctgtacaaaaccttcaccgacgcggcggaaagcatcggcgaagcgtgggacagccgcgagttcggtaaggccatccgcgaaatcatggccctcgccgacgtggccaaccgctatgtcgatgagcaggcgccgtgggtggtggcgaaacaggaaggccgcgacgccgacctgcaggccatctgcactatgggcctgaatatgttccgcgtgctgatgacctggctgaagccggtcctgccgcagttggccgcgcgtgcggaggcattcctcaacagcgaactgagctgggatgccattcagcagccgctgctggcgcataaggtgaatccgttcaaggcgctgtacaaccgcatcgagatgaaacaggtggaagccctggtggaagcctctaaagaagaggtgaaagccaccgcggcgccggtcaccggtccgctggcggacgatccgattcaggagaccatcacctttgacgatttcgccaaagtcgatctgcgcgtggcgctgattgaaaacgcggaattcgtcgagggctccgacaagctgctgcgcctgacgctggatctcggcggcgaaaaacgcaatgtcttctccggcatccgctccgcttacccggatccgcagccgctgattggccgcctgacggtgatggtcgccaacctggcgccgcgcaaaatgcgcttcggcatctccgagggcatggtgatggccgccggccctggcgggaaggatatcttcctgttaagccctgacgacggcgccaagccgggtcagcaggtgaaatagcaaaaaagccggagagtatctccggcttttttttgcccggcggcgctatgctagcacgcgcccgggggcagtcgttgtaggccgggtcaggcgaagccgccacccggcaaaaaatcatgccttcgggttatgcacccgctgggtcagtccgcgcaggaaattgcgcagaaactggtcgccgcactcgcggtagtttttgtggtcaggcgagcgcatcatggcggtgatctccggcaccgacacccggtatttctgctcgctcataatcgcctggatatcgtccgttttcagcgagaaggcgatccgcagctttttcagcaccgtgttgttattcacccgacgctccagcgccagctccggggccgaatcatctttgccgcgcttgtcatagataaggccgttaaggaaacccgacaggataatgtccgggcagcgaacaaagccctcttcatcctctttcgtcgtccaggtgtcgaagctggcggcggtggattccatagcggagagcgcgagaatgcgcaccatatcgttattattgactttcagggtgtagcgcaggctacgaagaatatcattactgagcatgagggccttttactgtcgatgatgcaatggggcgcagtgtaccagctttacaggccaatcgcctctttcaggctttttaaatagcgtcggctcaccggcaccgtttgcccggcgcgcatcagcagctccgcctggccattctcctccaggcgaatctccttcaggtgcgccatattcaccagatactggcgatggcagcgcagcaacggcgtgcggctctcgagggtgcgcagggtgagttcggtaaagccctcttttccctcgcggtcggtcacgtagatgccgctcatccggctgctgacgaaggccacatcctccatctgcagcagccagatacgactgtggccggtacagggaatgtatttcagcgtctgctgagcatcatccagcagcgacacatcctgcagattacgctcctggcgcaggcgggcgagggttttctccagccgggcagcttcaatcggcttcagcagatagtcaaaggcatgctcctcaaaggctttcaccgcgtattcatcaaaggcggtgagaaacacgatataggggcggtgctccgggtcgagcatcccgaccatctccagaccgctgatgcgcggcatctggatgtcgagaaacagcacgtcgggacgcagcttatgcaccgcgccaatggcctccaccgcgttgccgcactcgccgacgatctcgatatcgcgctgtgtctccagcaaaatgcgcaggttttcccgcgccagcggctcatcatcgacgatcaatactctcagcatgcattctcctccaggggcagacgtagggtgacacgggtaaagcgctccggctcgcaggtgacgctgatgccgcagtcggcgccaaaacgcgcccgcagccgcctgtccaccagattcatccccagcccgctggcctgggggttggcccggtacagcccggcgttatcttcgatatccagctgcagccagcgatcgtcctggctggcgcgaatggtaatttcgccgacgcctagatgctgcgatgtaccatgcttaatggcgttctccacgatcggctgcagggtaaaagccggcagctggtgatgcgccagcccttccggcaccgccatctggatctgcaggttagcctgaaagcgagccttctcaatctgcagataggcgttaacatgctcgatctcatcggcaagagtgacaatttccgtcggccgtttcaggttcttgcgaaagaaggtcgacagatactgcaccagctggcctgcctgatcgctgtcgcggcggatcaccgccttcagcgtgttaagcgcgttaaacaggaagtgcgggttgacctgggcgtgcaggagcttgatttcggattgcgtcagcagcgccttctgccgctcgtactgtccggcgaggatctgcgccgacagcagctgggcaatcccctccccgagggtgcggttgatcgaactgaacaggcgatttttcgcctcatacagtttaatggtgcctatcacccgttggttctcgccgcgcagggggatcaccagcgtcgaccccagcttacagtgcggatgaatcgagcagcgataaggcacctcgttgccgtcggcgtagaccacctccccggtctcaatcgcccgttgcgtatacgaggaggaaataggcttgcccggcagatggtggtcgtcgccgatgccggtaaacgccagcagcttgtcgcgatcggtgatcgccaccgcgccgatgtccagctcctggatcagcacctgggccaccttcatgctgttctcttcgttgaacccctgacgcaggatcccctcggtggacgccgccaccttcagcgccgtggcggaaaaggcggaggtgtacttctcgaacatcgcccgtttatccagcagaatgcgcataaacagcgccgctccgacggtattggtgaccatcatcggcgcggcaatgctctgcaccagatgcagggcgtcctggaacgggcgggcaatcagcagaatgatcatcatctgcaccagctcggccacgaaggtgatcgccccggcggtcagcgggctaaagactttgtccggccggccgcgtttgaccagcacgctgtgcaccagaccgcccagcagcccctcaacgatggtggaaaccatgcagcttaaggcggtcattccccccagcgagtagcggtgcaggccgccggtgagccctaccagcccgccgaccaccggcccgccgagcaggccgcccatcacggcgccgatggcgcgggtgttggcgatggagtcttcgatatgcagaccgaaataggtccccataatgcagaaaatggagaaagtgacgtagcacagcagcttgtgcggcaggcgaacggtgacttgcatcagggggataaacagtcgggttttgctcatcaaccacgcgatgaccaaaaatacgcacatctgctgaagcagcagcaacaccagatcaaactcgtacatacccgcaaaccacacatgcctgaaagcgcgtaccataccctgcctggcgaaaactttctttgaagccctgcataaaaatgaaaaacgacggccaggatcacacttttttgcggcgcgttgcgcagcaaacgcggcaaaaaccccggcgcggcgctaaaccgcaattaatgtttcattaacacctgcgcttcaccgtataatccccttgttaacatcaggagcctattatgaagccagcgaaaatcgcggtcgtcaccctcttcttacttatggccatcggcgggatcagcggcgtaatgctggccggctattcctttattgtgcgtggcggtgtcggctgatccagcgggtcagacgctcaaacgcgcggtcgacgataatcgccgccagggccaccagcagcgccccctgaacaatataggcggtattaaagccgctcaggccgatgatgatcggcgtcccgagcgtactggcccccaccgtcgaggcaatggtcgcggtaccaatattgacgatgaccgaggtgcggatccccgccaggatcaccggggccgccagcggaagctccaccttatacagacgctgccagccggtcattcccatcccttcagccacacctgacaccccaggcggtatcgaacccagcccggccagcgtcccctgcagcaccggcagtatgccatacagcgcgagggcgatgagcgcgggcagccagccaaagcccagcaccggcaccgccatcgccagcaccgccaccggcggaaaggtctgaccgatagcggcgatggtctccaccagcggacgaaacgcgctgccggcgggccgggtgaccgccacccctgcccccagcccgattgccgttgccgcgaggctggacgccaccaccagccagccgtgatcgagagtgagcgcccagaagctctcctgctggtagaccggccgcggcagttccgggaacagccgactgaacagcggcgcgctgtagggcagccctgccagcaagccgataaacagcgcgataagccaccacagcggctcacgaagcgccttcatggctcatctcctggcgcagcagatcggcaaaatgcagcgtaccgcagggcctgccttcggcatcgaccaccggcagcgtctcgcagcgccgggcgacaaactgcgacagcgcttcccgcagggtcatggtgacggtcagcccctcgcccgccagccgttcgtcgggacgcaaatagtcccccacctcgcgcagcgacagcaggcgcacacccagctcgctgcggccaaaaaaggtctgtacaaagctatttttcggtcgcaggagcatctccagcggcgccccctgctggaccacctcgcccccgtccatcagcaccaggtggtccgccagacgcagcgcttcgtcaatatcatgggtcaccagcacaattgtccgtcccagcagacggtggatgcgcagcatctcctgctgcagcgcctcgcgggtcaccgggtcgagggcgccgaagggctcatccatcaacagcacctccggatctgccgccagcgcccgcgccacccccacccgctgctgctgaccgccggagagctgatgcgggtaacggtcgcgcagcgtcgcctccagccccagcagcgccatcagctcgtcgatccggtcggcgatccttgcccgcggccatctttgcagctgcggcacggtggcgatattctgcgccaccgtccagtggggaaacaggccgatggactggatggcataacccatccgccgccgcagggtcaggaccggctgcaggcggatgtcctcgccggcaaagcgaatagtgccccggtccggctccagcagacggttgatcatcttcagcgtcgtcgacttgcccgagccggaagtccccaccagcaccgagaaagcgccttcgcgcagctccagggtcaggtccttcaccgccgggtggccggcaaacactttgctgaccccttgaaattcaatcattggcctctccttttagccaggcgccccacagggcgaacagggcatccaccaccaccgccagggcaatggtcggcaccacgcccagcagcaccagatccagcgcactgctcagcagcccctgaaaaaccagcgcgccaaagccgccggcgccgatcagcgcggccactaccgccatgccgacggtttgcacgctgaccacccgcaggctgcgcagcagtaccggcatcgccagcggaagctgcacctgacgaaagcgctgcccggcgctcatgcccattgccgtcgcgctttccagggcatcctgcggcacctgctgcaggccggtcaccaccccgcgcaccagcggcagcagcgcatagagagtgagagcgatcagggctggcgccacgccggtcccggagacgcccagctcgcccagcgtcgggaaataacgcgccagaccggcaagcggcgcaatcagcaggccaaaaagcgctaccgacggaatagtctggatcacattgagcgcggtgaaagccggcgcctgccagcgcggacgccgccacagccatacccccagcggcaggccaatcagcaggcccggcagcagggtgccgaacagcagaagcagatgctggcgcagggcgtcatcaaatacctcctgacggttggcatactccttcagcaatgagagctgatcgagcgccccgatagcgagcaggatgatgggcaacagccagacttgcgcattgagcagccagcgccagagcggccggacggtaagatgacggatggcctcgctggccagcagcagacaaagcgccagcgacaaccacaggccgctgccgggcgaggtgcgcgccagcggcgagccgtggcgggagagctcaagcgccgcctggccgctgccccagataagcagcgggaagagcagttcggccagcagcaggtgaagaagcggcgcggccctgcctggcagccagcaaagcagcatcccggcaagggccgccgccagctgaacgccggcgagccagggcattacctgccacagcccgcgcccttccccggagagtaagcgattcggcgcgtaagtaataaacggcagcgccagcgtaaccagcagcagacctgtcagcagcaggccgacgcggtgagtacagcgaatggtcaccggtggcttacttcagcaggcctttctgctgcagataatctgccgccacgcgcttcgcatcctggccctccaccgcaatgcgagcgttcagctgctgcagcgttttttcatcgaggctggcgaagaccggctgcagccagtcggcgatctgcgggtaggccttgagcaccgcctcgcgcaccaccggcgtcggggcatatatcggctgcacgccctgcgggtcgctcagcgtctgtaaccccagggccgccaccgggccatcggtgccgtaggccatcgccgcgttaacgccggaggtctgttgcgccgccgctttgatggtcaccgccgtatcgcccccggccagcgacagcagctggttctggttgaggttgaagccatacgctttttcaaacgccggcagcgcgtccgggcgctcaataaattccgccgaagccgccagcttaaattcgccgccctgcttcaggtagcgactgaggtcggccagcgaggtcagcttatttttctccgccaggtcctggcgcacggcgatagtccaggtgttgttggccggcgccggggtgagccataccagctgatgtttctcctgatcgaggcgcttcaccttctcatagccctgttgggcattcttccacgccgggtcgttttcatctttgaagaagaaggcgccattgccggtatattccgggtagatatccagctcgccggcgacaatcgccccgcgcaccaccggcgtggtgccgagctggattttattaatcgtttttacgccgtggctttccagcacctgctggatcatattgcccagcagcgcgccttcggtatcaattttcgagccgaccttcaccggctccgccgcctgcagcggtaaacttatcagggcggccagcgccagcgcgccggaccatgtcgttgccatcttcatcccgcttccctcagttcttttgcgcttcgcttacagaagcttaagagaaaagcgtagcccatttgccagcgatgcgaaaaagaaaaggccgattaatcggcctttaaagcgtgacgttggacttaagagcgatgccttacagcagctcaaactcgctctgcttcacgcgggctgagtccacgccgataaagacattgaatttgcccggctcagcaacgtatttcatttgctgattccagaacttcagcgcgtcgacgtcgattgggaagctaacggtttgcgtttcgcccggtttgagggtgacctttttaaagccgcgcagcattttcaccggccggctcatggaggcggtgacgtcctgcaggtagagctggatcaccgtcgccccttcgcgattgccggtgttggtcacctgcacgctggcggtcacgctgccatcgcgcggcatggtggccgacgacatgttgacatcggagacgctaaaggtggtgtagctcagaccgtaaccaaacggatacagcgggccattggcttcatcgaagtaacgcgaggtgtacttgttcggcttctccggattatacggccggccggtattcaggtggctgtagtaggttgggatctgccccaccgagcgcgggaaagacatcggcagcttgcccgacgggttgtagtcgccaaacagcacgtcggcgatggcgtggccgccttcggtgccagcaaaccaggtctccagcagcgcatcggcttgctgatcctctttcaccagcgccagcggacgcccgttcatcagcaccagcaccagcggtttgccggtggctttaagagcggcaatcagattgcgctggctctgcggcagggtgatatcggtccggctggaggcctcatgcgccatgccctgcgcctcgcccaccacggcgaccaccacatcggattgcttcgccgccgcgaccgcttcgtcgatcatttcctgcggcgagcgtgggtcaacctgcaccgcgttctcatacaaattgaggaaatcgacaatgcctttgtcatcggtaacgttcgcccctttggcgtaaatcactttgccgttatcgcccagcgcttctttgatgccggtcaggacggtcaccgactggtcggccaccccggccgcggaccagctgcccatcatgtcgcgcttgctgtccgccagcgcgcccaccaccgcgatagtgccggattttttcagcggcagcgtatcaagacggttcttcagcagcaccaggctctcgcgagccacttcgcgcgcctctttacgatgcagacgactttccgcattggtgtcctgcgggtcagaatctttcggtcccaggtggctgtagggatcgttgaacagtcccatatcatatttcacgttgagcacgtgtcgggtggcatcatccagctcggccatggtcaccttgccggacttcaccagccccggcaggtacttgctgtaatactcgtcgctcatgctcatgttgatgccggacttcagcgctacgcgcaccgcgtcttccgggtcggaggccacgccgtgcttaatcaactctttgatggcgccgtggtcggaaacggtgatgcctttaaagccccactggtcgcgcaggacgtctttcagcagccaggaatcagaggtcgccggggtgccgttcagcgagttcagggctaccatcaccgcgccgctgccggcatcaagcccggctttatacggcggcatatagtcgttgaacaggcgctgcgggctcatgtcgaccgtattgtactctttcccgccctccaccgcgccgtaggcggcgaaatgcttgacgctggtcatcaccgaatagcggtccgccgggctcttgccctgcatcgactccaccatcgcctggcccatcatcgtggtcagataggtgtcttccccgaacccttcggaagcgcgtccccagcgcgggtcgcgggagacgtcgaccatcggcgcccaggtcatgttcaagccgtcatcggcggcttcataagctgacacgcggcccacggtcttcaccgcatcaaggttaaacgacgaggccaggccgaggcttatcggaaacacggtgcgctgaccgtgcagcacatcgtaggcaaagaacagcgggatcttcaggcggctaagctgcatcacctgatcctgcatcacacggatatccgggcgggtaacggtgttaaaaatcgcccccacctgaccgttcttgatcatttcacggatcgcctctttcgggttatccgggccaacgcttatcagacgcagctggccgattttctcgtccaccgtcatttttttcagcaggtcggtgacaaaggcatcccgcgcctgcggggtcagggggtggttaccaaacagttcatccgccagcgcgggttgcagcgccagactcacggcgacgcctacagtgcagagccatttcattgttatctcgctttatctcagacggggactcggtaaaacataataaaaaccgcagtttgccatatatataaacaacgcgcccgcagaatgctaaggttcttctctgatttttgcgaaacattcatgcatcaaattgtcatacaaagcgctatgcttatcctcgatatttcgcgcaccaccacaaggagtggaacatgtcatctgcacccactgacacccataaaacgtttctggctgacctggcgcgcctggttggcccttcgcatctgctgaccgacccggcaaaaacccagcgctaccgcaaaggcttccgctccggtcagggcgaggccctggcggttgtctttcccggtaccctgctggagctctggcgcgtgctcaacgcctgcgtagacgccgataaaattattctgatgcaggcggccaacaccggcctgaccgaaggttcgacccccaacggcaatgattacgatcgcgagatcgtgattatcagcaccctgcgcctggacaaactgcatctgctggacaaaggcgagcaggtgctggcctggcccggcaccaccctctattcgctggaaaaagcgctcaaaccgctgggacgcgaaccgcactcggtgatcggttcgtcatgcatcggcgcgtcggtcatcggcgggatctgcaacaactccggcggctcgctggtgcagcgcgggccggcctacactgagatgtcgctgttcgcgcagattgacgccgacggcaagctgaagctggtcaatcatctgggcatcgatctcggcagcacgccggagcagatcctcagccgcctcgatgacgaacggattagcgatagcgatgtcctgcacgacggccgccacgcccacgatcacgactatgtcacccgcgtgcgcgatgtcgatgccgacaccccggcgcgctataacgccgacccggaccgcctgttcgaatcctccggctgcgccggcaagctggcggttttcgccgtgcgtctcgatactttcccggcggaaaagcgccagcaggtgttttacattggcaccaaccagccgcaggtattgaccgagatccgccgccatatcctcgccgagttccagcatctgccggtggcgggggaatatatgcaccgcgatatttacgatatcgccgagaagtatggcaaagacaccttcctgatgatcgacaagctcggcaccgacaaaatgccgttcttcttcaccatgaaggggcgcaccgacgcgatgctggagaaagtctcgctgtttaagccgcactttaccgaccgctttatgcagaagctcggccacgtcttcccggcgcatttaccggagcggatgaaaacctggcgtgataaatatgaacatcatctgctgctgaagatggctggcgacggcatcgaagaagcgcagcgttggttgacggagtacttccagcaggccgagggggatttcttcgcctgtacgccggaggaaggcagcaaggcgttcctccatcgctttgccgccgccggcgcggcaatccgctatcaggcggtgcatgccgacgaagtcgaagatattctggcgctggatatcgccctgcgccgtaacgataccgagtggttcgaacatctgccgcccgaaatcgacagccagctggtgcataagctctactatggccactttatgtgccatgtgttccatcaggattacatcgtcaggaaaggggtcgacgcccacgcgctgaaggaaaaaatgctggagttactgaaagcgcgcggcgcccagtacccggcggagcataacgtgggtcatctgtatgaggccccggagagcctgcagcagttctatcgccagaacgatcccaccaacagcatgaacccggggattggtaaaaccagcaagcagaaatactggggtgaagcggccccgacgccagcctctccggcggatccgcaataatcgacggcaggactattcagcctggcgcttctgtattacgctgcacgccggagaatgtttctccggcagattcaggagcgccgccatgcccgcagaggccccgttactcgacagtgatttagaaattcgcgaagcgctgcccgacgatgcgcacgccatcgccgcgctgtatgtctggcacgtgcttaatggccgcgcctccttcgaagagatcccccccaccgttgacgaaatgcgtaaacggatccagaccgtgcgcgacaacgggctgccgtggctggtagcgctgtggcgcggggctatcgtcggctactgctatgccaccttctatcgcccgcgtccggcctatcgctacaccctcgaggaatcgatatacgtggaatccggaatgggcggacgcggcatcggcagcgcgctgctgtccaggctaatcgctgagtgcgagaaaggcccgtggcggcagatgctggcgatcatcggcgatggccataacaatgccggctcgctggcgatccataaaaagttcggctttaccgtggcgggtcagctgcgcagcgtcggctacaagatgggcgactggcgggatacgttgattatgcagcgcgcgctgggtgacggcgactggacgctgccggagtgatatccggcgccaaatccccggctcgcggcgtaaacgccttagccgggctaccgttcagcgcggttccgtagaagcgtcagccgccatcctgcacaaacaccggcactcggcctctgcgcttgccgggcctgcgaaaggggcgaacccggcgccaaatcacgtagcccggataaggcgcaatgcgccgccatccgggagacatgcagattaatcgttctgcgcggtctgcgcgccgcctttcagcatcgcctccgccatctgcgcttcgcgctgctttttatagctcagcgccgaggcgggtaccggcatcaccttcccggtttcaatccaggtccgcaagcggctggcgtcagcgaagtgggtatatttgccgaaggcatccatcaccaccagcgccaccggacgttggttaatcaccgtgcgcataatcaggcagtggccggcagcgttggtgaagccggttttggtcagctgaatgttccagttatcgcgatacaccagatggttggtgttgcggaacggcaggctgtaggccggatgggcgaaggtggcggtctcttctttggtggtgctcagctggccgatcagcggatactgctcgctggcgatcagcagtttggtcagatcgcgggcggtggagacgttatgcaccgacaggccggtgggctccacgtagcgggtatgggtcatgcccagcgcctgggctttggcgttcatcgcgcgaataaaagcgtcgtagccgcccggatagtgatgcgccaggctggcggccgcgcggttctcggaagacatcagcgccagcagcagcatatcgcggcgactaatctggctgttgaggcgcacgcgggagtagatccccttcatttccggcgtatggctgatatccaccgtcagcatctcatccagcggcagatgggcatcgagcaccaccatggcggtcatcactttggtgatcgacgccatcgggcgcaccagatcaggctggctggcataaatgatttttttcgtggccagatcgacgatcatggcgctgccggaggcaatttccggctgcgaggcggtcaccgccgtcggggtttttgctaacgcctggggcgcaaaaggcacagccagcagcaaggtcaggctgagcaaagagactcgaaatttcggcatcatgggcattctgaaaagtatttttgcacgttatggaacgtacgccgcgaggttaagtgggcaacttcgctggcaaacgccatcataccgcgccgtaaggccctgtgcctaataagaatcgtgaagaaatgctgcattgccgacataaaatacatatttgccggcaatgcatatttacccgtgccgcccgatcagaagagtcggtagccatacccccagagcaccacggtgatggccagcagcacttccagcaccagtaccccaatagctagcgtcgagctggcaaagcttaacccctcttcccgattaatgctcaggaaggtcggaatgccgagatacagcagatacccggtatagaacagcgcaatagtaccgaccagcgcgcacagccagaccagcggatagagcgccacaatcccgctcagaaacagcggggtggcgacgtagccggcaaacaccatgcagcgtttcagggaaggctgctgcggatactgcctcgccatccaccagatgacccgccccatgatcgccaccccggcgagcatcacggcgtaaaacagcaccgccagcgccagtccggtcagcatcgacagtttaatcacggtgccatcgccgaagttccagcccagctgcgtggtgccgataaaggcgcagattaccggaaccgccgccatcagcagcacatgatgcgtatagtgatgagaaatggtttcattctcgctcttaatcacgctcatttcccggttgggatgagcgaagagcccccagacatggttcatagcgtcccccttgtcacggcttcgtactgcactgatccaagtataattcaccctgtagattattttatgtacagcacagaaaattctgcgtcgccgcgttttggtcagcagggtgtatgattaagaggtgatgaggtaaggagaaaagctttttatggatatcaatcacctgatttcccagtatggctacgcggcgctgatcgtcggcagcatggcggaaggtgagaccattaccctgctgggcggcgtcgcggcgcatcaggggctactgaaatttcccctggtggtgatcgccgtcgccctcggcgggatgattggcgatcagctgctctatctggtcggtcgccgcttcgggggacgcatcctgcgccgtttcgccagtcagaaagcgcggatccgtaaagcgcagcgtatgatccagcaccggccgtggctgtttgtcatcggcacccgctttatgtatggcttccgggtaatcggccccctgctgatcggcgccagccgcctgccgccgcgcattttcctgccgctgaatattgtcggagcgctggtgtgggccctgctgtttaccaccattggctatctcggcggcgaggtggttggcccgtggctgcaccatctggacgcccatctgaagcactggatctggctgatcctcgcagtggtggtggtggtggccgcccactggtggctcaggcggcgcgagagtaagaagaaagattaagcggcgcgcccgcgggcgcaccgtggttggcggttacttcaccgtctggtggtagccgccgccgagggccgaggtcagttgaatgctggcgtcaatccactggccgtgcaggcgcaatgcggtgatccgctcctgcagcgccgggagcttcgccatactgactctggagccaggtaagatccccgccgccattcgggcctgcgccagatccactacccgctgagcgtctttttcaacctgctgctgctgctggcttttggccattaatgtttcgacctggctggcggttttcgccacctggttaacggcatccaccaccgctttgttgtactgggcgatcgacaggctattctgcgcgctggcgatatccaggttggcgttaaggcggccgctgtcaaagatcggcagcgtcagcccggcagtaacgcccatctgctgcgccgaatggcggaaaagatcgcttaagtgcagggcatcctgctgcaggaacgccatcagattgatgtccggataaaacgccgctttcgccgcgtccacttcgctcagggacgcttcaatataccagtgggcgacctgcagatccgggcggcgcgccagcagctcatagccgagggtatctggcagctgcgcgctgaccgttggcaggcttgcgggtttgaggtttagcgactggctctggctgttggtcagggccatcagccgcgcttcaatctctttcatcgtgcccgtcacgtccgccagctgctggtcggttttgctgacgttaatatcgttctccgccccttcggcggagttagtgatcccgcgctgatacagggccttgtcgaccgtcacgatattattttgctcgtttttcacctgctgcagcaccgctttgatcgccgcttccgtctgccactgccagtacagacgcgccacgctgccggagagcagctcacgggtctgggcctgttcagcaacctgggctttcagctcgccgatacgcgctttcaccagcgcacggtttttgccccacaggtccagatcccaaccagcggtcaggccaaaggtaccgttggtgtaccacgggccggtattgccgtcggtgtcggtagcaaacggtcccatcaggccttcggccgacatgcgctggcgttcaatatcggcggagaaatccatctccgggccaagattcgcctgcgacattcgcgcctgcgcttcggcaagcctgatgcgctgttcggcaatctgcatatccggcgcgttggccaacgctcgctgaatcagattattaagctgtgggtcatggtaatctttccaccagtcagtctgcggccagccatttttcacggcggcagggagatccatggaaacatgggaggctggaatttgctgctgcggcggattagcaacctcatgagatggcgcgcagccagccagcgcgatggccaggggcaatgccgccagcacgcttttatttaatatcaatttcattggacaggtcagataacttaatcaggttggttatcataagttaattgaattaaacgcgtttagtaaagcgtgtgactaaattattagtttgctaaaaataaacaaccttatcaattcaagggatgaatataagccggcatcttttaacgagccgcacctcttttccaccctgcccgctctggatgaagagaaagaacctccgatgacctttttactgcgcgcgcgtaaaccggctaatctcccgcccggcgatggccgggcgggcatcctttaggctttcaggctggcgccgcggctggcaatcacctctttataccagccaaagctcttcttcttactgcgcgccagggtgccggtaccgtcatcatggcggtcgacatagataaagccgtagcgcttcgacagctccgcctttgaggcgctcaccaggtcaatcggtccccagctggtaaagcccatcagctcaacgccatcgtcaatggcttcccgcgcctgcaccaggtggtcgttcaggtaactgatgcggtagtcatcgttaatgctgccgtcggcttccaccttatctttggcgcccagaccattttccacgataaacagcggcttctggtagcgatcccacagcatgttcagcagcgtgcgcaggcccagcgggtctatctgccagccccactccgagctcgccaggtgcgggttcggcaccatgctgagaatattgccgcgagcctgctggttcagcgcctcgtcggcggtgacgcagccggtcatgtagtagctgaaggagataaagtcgacggtggtttttagcgcttcacgatcggcgtcggtgatggtgagcgtgatgccgttgtcacggaaatagcgctgcatatagcccgggtacgcgccgcgcgcctgtacgtcgccgaagaactgccagctgcggttctcctgcagcgtctcaaacacatcctccggtttgcagctcaggggatacatcagcccgccgagcagcatattgccgattttgccctcaggcaccagctcatgacaggctttgaccgccagcgcgctggccaccagctggtggtgaatcgcctgatacacttcgcctttgctgctgccggccggcaggccgacgccggtcatcggggcatgtagcgacatattgatttcgttaaaggtcagccacagtttgaccttatttttatagcggctgaacaccgtccgggcgtagcgctcaaagaagccaatcacctcccggctgccccagccgccgtagttttttaccagcgcccatggcatttcataatgcgacagcgtcaccagcggggtgatgttgtgcttcgccatctcgtcgaacagcttgtcgtagaacgcgaggccggcttcgttcggctcggcgtcgtcgccgttggggtagatgcgggtccaggcgatggagactcgcaggcagttaaagcccatctcggcaaacagggcaatatcttccggatagcgatggtaaaaatcgatcgccacatcttttatgccgctgtcgccgggtacgcgctcgaccacttcgccgaacacgccgtgcggctgtacatcggaggtggataagcctttgccatcttccagataagcaccttccacctgattggccgcggtcgcgccgccccacaaaaaatccgccgggaatgttttcatctctttctcctgtgattaatggctgactgacaacagcggctgaccggcttcgacggcgctggacgccaccgtgtcaatctcccggtagtcgtcgctgttgctgataatgatcggggtcgccaggtcgtagccggcgtccagaatcgcctggcgatcaaactcaatcagcagatcgccggcctgtaccctgtcgccctctttcacatgcgcggtaaagggcacgccgtcgagtttgaccgtgtcgatgccgacgtggatcagcagctcaatgccgctgtcgctttgcaggccgatggcgtgtttagtctgaaacagggaggccacttcgcccgggaacggggcaatcacttggcccaccgccgggataatggcgacccctttacccagcaggccgctggcgaaggtgctatccggcacctgctcgagggcgataacgctgccgctcatcggcgccagaatatcgtttgccgaggccggggctaccgtcacggcgcccggtgcagcgctggcgcgcggcaggccggcgaagaaggtcagcacgcaggcgagcacgaaagccacgccggtgccgataagcccgccccagacgctggcgtcaatcccgccgggcgggatcatctgcgccgggaaaaagatattcggcacgccgaacgagtaagcatgactattactgaaggcggtgatcgccccgccgatggcgccggcgatacagccgaagataaacggacgacgcagcggcagggtcagaccatagatagccggctcggtgatgccaaacagccccgcagagaaggcggaaccggccagcatccgctgacgcgcatcgcgggtggccagcaaaatccccagaaccgcccccacctgggcaatcaccgccggaagaataatcggcagcatggagtcgtgaccaagtaccgtcatgttgttgatcatcaacggcaccagcccccagtgcaggccgaaaataacgcacacctgccacatggcgcccagtaccgcgcccgccagccatggggcaaacgcataaatgaactggtagccgttggccagcagatggctcagccaggtggcgaccgggccaatcaccaggaaggtgagcgggaccaccaccgccaggcagatcgccgggctgaagaagtttttcatcgatgacggcaacagcgcattgctcttgcgctccaaccagcaggagacccatgaggcgagaataatcgggatcactgatgagctgtagttgataaaggtcaccggaatgccgagaaagtgctccaccgccgcgcccggcgcctggctggcctcaaaggcctgaatcatcagcgggtgggttaacgccccgccaatcaccatcgagataaacgggttgccgccaaacttcttcccggcggtatagccaagaaacagcgggaagaaaaagaacagcgcgtcgctggcggcaaaccagattttataagtcccctgctccggcgtaagccagccgcaggtcaccgccagcgccagcaggcctttcagcagaccggttgccgccatcacgccgataaacggtgtaaagatgccggagatgatgtcgataagctggcttaacaccgatcctttggccgctttttcctcggcaaccggttcgttgtcatcgcttaaccccgcctcctggcgcaccgccagccagacgtcgtgaacgtggttgccaatcaccacctgaaactggccgccgctctccaccaccataatcacgcccggattggccttcagcccttcggcatcggctttgccgttatccttcagtttaaaacgcagacgtgtcgcacagtgaaccagactcacaatgttctctttgccgccgacgcggttgagaatatcctgcgcgagtgctttatattccatgctcttttccttactgccgctgcccgcagacaaccggcgactgagtagtaaaaaataaaaaaacccgagaaccacgccggtgggcgtcgcgctcaggttttgcctgcatcatgcagtaacaatccagttttgttggggagaattaacgcccctcttttcttacccgttcgatatgaatggcaagaaacataatttcttcggtggtcagcgaccgctgatactgcttttgcagatgcgtcgccaccgtttccgcacacttccacgctttggcgtagttatctttcaccgcgctgtgcagcgagacgtcgtcatcttccaccaccgtgcgcgtcagcatccgctgggcgaaaaacttcaggtgggtgacgaaacgctgatagctcagcgactcttcatcgtagttaagctgcagctgatacttcaccagctgcaggatctcctgcatcacccgggtcacgtgcatgacctccggcatttcgctgttgagctgcgccgtcaccagatgcagggcgataaatccggcttcgtcctccgccaactccacgccgagccttttggcaatgatggcccttgcctcctggcccagcgcgaactccttcggatacagccgcttaatctcccacagcagcacgttacgcagtgcgatgccctttttctgccgctcgatagcaaaatgacagtgatccgttaacgtgatgtacaaactttcctgtaacttgcccagccgtccgcgtgccaggtcgataatgcgatcgcaggtggtcatcacttctaacggtatttgactgagcagctcgcctaagcggccgaccagctcatcgctttgtaaggcgaaaactttttcaattttactgtcgtccagcacgtcgcccgggcgtttctgaaaggccagccctcgccccatcaccacctgttcgcgccggtgctcgtcgagaaccaccaccacattgttattgagtactttggcgatttgcatatagaccccagaaacaaaaaaacctgacccccgacgaaacgccaggtgatcaggttttgcctgccgcagcagttgcaatccaacacccgcactgtaacaacttctgctgcgcgctcaacctgacaagtgaaaaaacgtgattaagatcgcgactatcagaaggtcacgacggttttccactccactacccacgcgtcctgggtctgcgcgacgccgcccggacggtgccagtactgcaggcccggctgcagctccagccaggagaccgggcggaagcgataatagagctcaccgttcagcgaatgaccggccaccggcaggtaagccggatcgttatagtcggtggcgccgcttatctgattcatatagcgctgattacgtgcgtagtggctgctcatgtcgatccacgtcaggccgaagccaatccagtcctccgggcgggcgtcaaacagaccgcggtagcgcatggaggcggcgacggcggagtggatatagttgctgcgctggtcgctgaggctgccgctcagtgagacgctcatcccccgcagcgggtcgtcggcgtggcgggtgatctgctggttcaggccggcgtacataaaccaggtgctgtcgtgctcggcgtaaccttgcggatcggtcgccccggcgccgccggatttaccgctgtagaggtcgctctgcggcgcgttagtccagaccacgccaaggttataggctcccggcaggccattaatcagcggacgggtttcgatctccatcggcagtaagatgcctttgctacccttcgtcgaccagctccacgcgtggctgcgcgcggtagcctgcgggttttgctccatcactccgcctttcagggtgaccgtcggcgtcagcttgtactccagggtggtgccccaggtatgaatgttccagttattccaggtcagcgagttggccgatttcccaccgcactgggtcagcagctgaaaatcgcagggtatgatctggtcgaaggtttgcaccttgttcatcatgccgatgcgccaggtcaggcggcggtcgtcaaagctgcgggcaaaggtgagccagccaaggcgggtaatcgacccgccgccccagctctcctgcgatagatcgttgaaactcacccgcggatcctgcagccgtttcgtggtgagattatcatcgtggttgcggttgacgatgttgccttcgagacgcgcatccggtatgccggtccagcgctccagatcctgggtaaaggtcagcgccacctggtcaatataggccaggtgtttatcatggtcataaccgccgccggcgttgtaggccatctcgttaagatagccgagattataatgaaagccgttttcttcaaggatcggacgaatgcctagcatatcgcccagcagcccttgctgcccggcttcaaaccccagcgcgctgccgttccacgccgggatgtccgcggcgctcacggcaggcgccatggccgccagcatagcgccgatcaaaagctgatttatttttttgttatgcattgtgatatccaccgtgactgaataaaaacaaaggggatccccaggctatttatttacccgttttctttttttaaaaatgaatggcaaaaagcgtccgtcggtaataaaaccgcgacaatgccagagaaatcgttatcacatctcattgttttacatcatcattttatccaccctgaatttttaccaaaaaaaaacctaagcactttgcgccacgaatgacgaaagtgcttaggttttgcctgagttcagtagcaatcctgaattgattgaccgcacattatcactttattcaacccatgcctatcatcaataggcatgcaagtaataatatgtgaagcgaataacagtatggcggttaatagcggccgatcgccgccgctatttcagcagacgtttgcagggcgcgaatttcattaaacagggtcagcgcctcggtatattccttgcgtaaatagcctaaccactgcttaattctcgccacatgatacagaccggtatcaccctgcttttccaggcgggtatatttttgcaacagctggaccacctgcggccacggcatgcgcggttcattgtatttgatcacccggctgaggttcggcacattgagcgccccgcggccaatcatcaccgaatcgcagccggtgacagccatacaatcctgggcgctttgccagtcccagatttcaccgttggcgaccaccgggatagtcaggcgctggcggatctcgccgatcgcctgccagttgatgcgttcggctttgtagccatcttctttggtacggccgtgaaccaccagttcgctggcccccgcctgctgcaccgcgtcggcgatttcaaagcgccgttcaccgctgtcccagccaagacgaactttcaccgtcaccggcagatgctcgggaaccgcctctcgcatggctttcgcgccgcgatagatcaactccggatctttcagcagcgttgccccgccgccgctgccgtttaccagcttcgacggacagccgcagtttaaatccaccccccatgaacccagcgccaccgcgcgggcggcattttccgccagccactcgggatattgtcccagcagctggacgcgtacgcgggttccggacggcgtgcggctctggtgatgcagttccgggcatagcctgtagaacgattttaccggcagcagttgatccaccacgcgcagaaattcggtgatgcagagatcgtaatcgttaacctcggtcagcagctcgcgcaccagcgaatcgagcacgccttccatcggcgccagtagaacacgcatatcgttacccggaataaaaagaggcgctatggtagcgcctccgggcgctggttgaaagcgctcaatgcgtcggaccagacgcacgccgtaccccgcacgctcgatgcggcaaagcggcgagataatctctatgctttacaggggtctgtggcgtcccattcgcctttatttgccgcgcctcatccagcaagatagcgtggtgagcgctcccgcctgagccgcaaggtgtcgggccctgacgggtgagactatggttcccgtaagctatcagcgctatgcatagaattcatgatgtgatcggtagcacattttagggattaattgtatgatgaatgcacttcatcaagggttattaccatgagtaaatcgctgactattatctggcagtacctgcgggctttcgtcctgatttacgcctgcctgtacgccggaatttttatcgccgggctgctgcctatcactatccccggcagcatcatcggcatgctgatcctcttcgtactgctggcgctgcaaattatgccgccgcaatgggtcaaccccggctgcaatatcctgatccgctatatggcgctgctgttcgtgccgatcggcgttggggtgatgcagtactgggatctgctgcgcgcccagctggggcctgtcgttatctcctgcgccatcagtacgctggtggtgtttgtagtggtgagctggagctcccatttggtgcatggcgaacgtaaagtgattggccaaaaaggaaaagaagaatgatgcatgaaatctggtggtcgctaccgctaaccctgatcgtcttttttctcgcccgcaaactggcggcccgctttaagttcccgctgctcaacccgctgctggtggcgatggtggtgattattccatttcttctgctgaccgggatctcctatgagcgttattttgccggcagcaaagtcctgaacgatctgctgcagccggcggtagtggcccttgcgttcccgctgtatgaacagctgcaccagatccgcgcccgctggaaatctatcattaccatctgctttatcggcagctgcgtggcgatgatcaccggcaccaccgtcgctctgctgatgggcgccacgccgcaaatcgccgcctctattctgcctaagtcagtcactacgccgattgctatggcggttagcggcagcatcggcggcattccggccatcagcgccgtgtgcgtaatttttgtcggcatcctcggcgcggtatttgggcatacgttgcttaacctgatgcgcattcgcaccaaagcgtcgcgcggcctgtcaatgggcaccgcctcgcacgccctcggcaccgcccgctgcgccgagctggactatcaggaaggcgcgtttagctcactggcgctggtgctgtgcgggatcatcacctcgttgatggcgccgttcttatttccgctgatcctcgcagtggtaggttaatagtgatttgaatcacattttttaatgcaacaaatcggagttgcataaagaatgagatattcatcacatatggaaccgctggccgcccgtacactggcttcccattacactgttatgaggcaacgctatgcactcacgttttcaagctgctttgacgactctggcagcagatctgcaggcggccatcgccccgatgctcaccgacccgcatttcccggcgctgctcgaagccgatcaggtggcgacgctgcagcatgcgacaggtctggacgaagacgcgctggcttttgcgctactgccgcttgccgctgcctgcgcgcgccccgacctttctcattttaacgtcggggctatcgcccgcggcgtcagcggccgctggtactttggcggcaatatggagtttctcggcgctaccatgcagcagaccgttcacgcggaacagagcgccatcagccacgcctggctgcgcggcgagacctccctgcgcgctatcacggtgaactacacgccgtgcggtcattgccgtcagtttatgaacgaactgaacagcgggctggcgctgcgcattcatctgccgggtcgcgaagcgcatgccctggagcactatctgccggacgcctttggcccgaaagacctggagatcaaaaccctgctgatggatgaacaggaccatggcttcccggtcagcggcgatgccctaacccaggcagctattcaggccgccaaccgctgccatgcgccctatagccactcgccttccggcgtggcgctggagctgaaagacggtaccattttcagcggtagctatgcggaaaacgcagcgttcaacccgacgctgccgccgctgcagggggcgctgaatctcctgagcctcaacggctatgattatcccgctatccagcgggcaatcctggcggagaaagccgacgcggcgctgatccagtgggatgccaccgtcgccaccctgaaggcgctgggctgccacaatattgagcgcgtcctgttaggttgatcagcctgagcagattgccggacggcgtcttcggcttatccggccgactttttataccgttaggtgtcgggtggcgctacgcttacccgacctacggttcgcgccatggcgacctgaagatccctatgccgggtgtcggctcacgccttacccggcctgcattcggcgatctgtctatattgctgaaaatccccgcaatcaaacgcgggtttcttgcgcttacccggcgggtaaagtagcctgaagactccgttgtctattattgagccaagttcatgttaaagcgtgcgttctacagcctgttagtcctgctcggcctgctgctgttgaccgtgctgggccttgaccgctggatgagctggaaaaccgcgccctatatctatgatgaactgcaggacctgccctaccgtcaggtcggtgtggtgctgggcaccgccaaatattaccgcaccggcgtcatcaatcagtattaccgttaccgcatccagggtgcgctgaacgcctacaacagcggcaaggtcaactatctcctgctgagcggcgataatgctctgcaaagctacaatgaaccgatgaccatgcgtcgggacctgattaaaggcggcgtcgatcccgcggatatcgtactggactatgccggtttccgtaccctcgactcgatcgtccgtacccggaaagtgttcgacaccaacgacttcattatcatcacccagcgcttccactgcgaacgggcgctgtttatcgccctgcatatggggatccaggcccagtgctacgcggtgccgtcgccgaaggatatgtggagcgtgcggctgcgcgagttcggcgcccgctttggcgcgctggcggacctctatatcttcaaacgggaaccgcgctttctcggccctctcatcccgattccggcgcagcagcatgacgtgccggatgacgcccaatcctacccggccgtcaccccggagcagctgctggagctgcagaaagaaaagtagcctccatcaacgcattcgtttcagatataaaaaaacccgcgccaggcgcgggtttttgatgcgttcaatcttatttcttacgggcgtatttcagggagtccagcgccacggcgaagataataatcgcccccttaataatgtactgccagtaagggttgacgccgatataggtcaggccgtagttgatgacggtgaagataatcaccccggtcaccacgccaaacaccgtccctaccccgccgctgaacgatacgccgcccaccacacaggcggcgatggcgtccagttcatacataaagccgaggttattggtcgccgaaccgatacgtccggcttccagcaggccgccgaaggcgtagaacacgccggagagggcatagatcatcagcaggtttaacgctacgttaaccccggagaccttcgccgcttccgggttaccgccgatagcgaaaatgtttttgccaaagcgcgtcttgttccacaggatccagacaaagaagacggcaatcagcgcgtagaaggtaatgtaggacaggcggaaggagcccagcgccacaaacccctgcgcgaaatgggagaagtggctgtcgaagccggagatcggcgacgcgcccacgaagtcgtagtacagcgagttaatgccgtagacgatgatcatggtgccgagagtggtaataaacggcgtcacgttcaggtaggcaatgacgatcccgttaatcaggccgatgaccgccccgatggcgcacaccagcaggatcaccagcgggatcggcatggtcgccatatccgggaataccttattggcattatccaccgcctgcagcatggtggcggcaatcaccgccgccagacccacctgacggccggcggagaggtcggtcccctgcgtgacgataagtccggccacgccgagggcaataataatacgcaccgaggactgggtcagaatattactcaggttgagcagacttaaaaatgtcggatcctggaaaataataatggccagcaggaccagaaggacaacatatatcccaccctctttcaggtaagtgagaaaactctttttatttaacgcactcatgtgaagcccctgatcttaaaggtgcaatgacgcaagacgcagtatttcgttttgcgtggtggttttagtctcaacaatgcccgcgaccaggccgttgctcatcaccagaatgcggtcggtaatccccagcagttccggcatttcggaagaaataataatgatccctttgtcttttttagccagttcggcaatcagctgatagatttcaaacttggcgccgacgtcgataccgcgcgttggctcatccagcatcaggatctccggctgggtcagcagccagcggcctataatgaccttttgctggttaccaccggaaagcgagccaatctgcgtatgctgaccgggggttttgacgcgcatcgagtcaataacccattgggtatcgctcttcattcgcgagttatccagcaagccgacgctgtttttatatttcttaatattggagatcagcgagttaaacccgatatccagataggcgtaaatcccggtagagcgccgctcctcggtcaccagcgcaaaaccgtggttaatcgcctcgttggcgctgtggttgttgatcttcttgccgtgcagcgtgatggtgccgctggccttctcacggatgccgaacagggtctccacgatgtcggtgcgtttagcgcccaccaggccggcgataccgagaatttcgcccttatgcaggtcaaaggagacatcgcgaatggagggctggcgcagcgaggtgagattgcgcacctggaggatcacttcgcccggagtgttttcgcgatccggaaaacgctggttaagcgaacgcccgaccatcatggcgatgatcttatccatatccagcccttccagcggctgggtggcgatccactggccgtcgcgcaggatggttatttcatcgcacaactggaaaatttcttccattttatgcgagatatagacgataccgcagccgcgatctttcagcttacggatgatcttaaacagatggttgacctctttttccgtcagcgatgacgtcggctcatccatgatgacgattttggcgtcataggaaaacgccttcgcgatctcaatcatctgcatctgagataccgataaggtaccgacgcgggcgcgcggatcgatatcaatatccagctcatcaaaaatggccttggtatcccggtacattttgtcctgatcgacaaacatgcctttagttggatagcgcccgagccacatgttatccatgaccgaacgctgtaataccaggtttaattcctgatgcaccatcgaaataccgttttccagggcttctttcgccgaatggaaatcgatctcttttccctgaaaaagaatgctaccggaatctttttgatagatcccaaaaaggcattttaataatgtcgatttaccggcgccgttctcacccattaacgcatgaatggagtgcggacgaaccttcaggttgacattatcaagagccttgacgccaggaaacgatttgttgatgttgctcatctccaacaaatattcgcctgaccgttcgctattattgctgaccatagttatacctggctgcgttcatgcaagccccgtccggcgcactagcgccagcaggagtctggttctgtatcaggaataatcgggcgtggataacccacgcccgcaattcacatcacgattatttgccggtaaactggctcaggttgtctttatcgacgcccacgtaggggacgcgaacaatcttgttgtcaattttccagttggtgcctgccgcggcgtctttcccgtcggcaaggtttttcgccagctcgaaggtcgctttcgcctggttgttggcatcgttcagcacagtaccggccatcgcgccggatttcaccagcgccagggcttccggcagggcgtcaacgccgaacaccggaatgctgctcttgttgtgcgctttcagcgcttcaaccgcgcccatcgccatggcgtcgttgttagcgatcaccacttcaatcttgttggcattcgggccggagagccaggcgtccattttgtctttcgcctgggcggtatcccacatcgcggtatccagctgcagctgctgggtcttcagacctttatcattcagctctttaataacgtaagtggtacgcgcttccgcatccggatggcccggctcgcctttcagcagaacgtactggatctgaccgtctttattcagatcccagttcgggttggctttccagtgcttggcgatcagatcgccctgaataatccccgactctttcgagtcggtaccgacgtaataagccttgtcataactatccagcgctttgcgggaaggctctttgttgaagaacaccaccggaatattctgcccgcgcgccttttcaatcaccgtacctgcggcggccgggtcaaccaggttaatcgccagcgccttcacgcctttcgccagcagcacgtcaatctgatcgttttgtttcgactggtcgttctgcgaatcattcatcaatagctggacgtctggcgcggatttgccatctttttcaatcgccttacgcactaccgacataaagttgtcgtcatatttataaatcgtcacgccgatacgggtatctgctgcgtgtgcggcggcgccaaataacagaccagccattacagcagacagggtaaacaccttcttattcatggaatctccggttttattatgcagggtcattattgtgagaaaatgcaggcgggatttgttgcattagtgttaccgcacaacgcatttcacgacgaaaattcggtcttccgtgtcgggtaacgctccagaaaaatacgactgtaaaactcgtttaacgccttgttcctactaaataaagtgaggaatatccatcacctcgtggttcagactggtaaacgctgccatcataatcaggcgaatgttaatatactgtgaatttactcacaaattgaaagcggttacatcccgcgatcgcgtcagttagtgatcggccccacagtttgccgctgggcaacggaatgacggcgcaccagcgtcggcataaagcagtgcgtcgcctcgcgatccagcttgccggccgcccccagcagcgccagctcggtggccagctttgccatcgacattaccggatagcgcacggtggtgagctgaggatcggtgtaacgggaaataggaatatcatcaaagccaatcagcgacagatgctgcggcacgacaatgccgttgtccttcagcgtcgtcagcgcgccggccgccatgctgtcgttataggcaaacaccgcggtgaggccgagattgcgccccagcagttcgaccatcgccgcttcaccgccctgcatatccggggagccggaaccgatccagctgtccggggcgatgatgccttgctcctgcagcgctttgctccacccttcccggcgcatatcgtcatcttcaataccgtggtttgaggagagatagccgatgcgctggtgaccatgattgagcagcatacgggtggccatcagcgcgccgctgacgttgtcgagtccgacgcagcgatgggcataccccggcacgatgcggttgatcagcaccatccccgggatatgttgcataaagtcgctcagttcatcatcgctcagcgctttcgaatggacgatcagcgccgagcagcgctgacggatcagcacctcgatggcgtgacgctctttttccgcctcgtgatagctgttgccgatcagcacatatttctgatgctgctgagcaacggtatccactgctttcaccagcgcgccgaagaaggcgtcggagacgtccatcaccaccacgccgatggtatcgctgacctgggtggccagcgcctgggcgttggcgttgggccggtagcccagttgggtcaccgctttcatcaccacgtcgcgcgtatccggactcaccagcgcgctgttattcagcacccgcgacacggtggccacggaaacgcccgcctggcgggcgacatcacgaatggtgatcatactcagcaaccttaagagaattacagcacgtcacattcacctcctgtgcttagcaaggaggctattctggcagcgacccgcggtccgctgcgtgagtgaggtcacacggctggaaacgtttacatccgttttgttaatgattgtgatcgagatcgttatctggatgtgtctttcaatgatgtgcctgacgcacgcagggttaactgacgccacagccattccaccggcccctggcggaagcggcgcagccagagcgatgagacaaggaggttaatggtccagatgggggggacaaaggccagcagctgcagacgatcgaagcgcataaacagcccgagatgataaaacagggtggtgcagatcagggtctgcagcaggtagttggtcagcgccatgcgtccgacgcaggcgatagcgcccaccaggcggaaacggcagagctgtggccagtagccccaggccagcgcggcatagccgatagcctgcagcggggcgctaagttcgcgcggcgcctgcagtaaaaacgcgcaccagcgatagtcccaggccagataccactgggcgaatattgccggcagattgaccgccatgccggccgccaccagcagcgcgccggtacgccggtagtgacgcaggctaaactgccccttcagccagccgctgcgcatcagcgccgcgcccatcagcatcatccccgccagctgccagccatactgcgcgcccagcgccagcagattgtcagatagcatatccgcccggttgctgaccgcctccatgccaccgtgcagcttccagtactgctcatactgcaggttcgccgcgtccggcgcccacgagcgattcgccgcggtcccggagatcatccccaacaggaccagcactgcaatgccggtgaggtagagcaccaccccggtgttgaacagcgatttgacatggtgcgcctcacgcaccatgcgccagctcaccagccccaccagggcataggccagcagaatatcgccatcccagaaaaaaagaccgtgaatgaaaccgagcagcgccagcagcgtcagccgcgactggatccagcgcttccctcgcggaagcaatagctgaagaccggcgccaaacagcagcgcgaacagggtgagaaacttcacctgcgccagcaggtcgaggagcgcccaggtccaggcatcgctaagggacgcgcttcctgaccaggcgggattgagataagcggccttcggcaagccgaaggcgctgatattgagaagcaggataccgaggatggcgacgccgcggacaaagtccagcgtgacatttctctccatgcaccctgctccgttttagtcgtggtgacgtactgcgcgcaggaattcctggcgggtattctggctggatttaaacaggccgccgagagaggtggtggtggtggcgctggtcgcgtcgcgaatgccgcgcgccttcacgcaataatgcaccgcgtcaatggataccgccacgttgttggtgccgagcagcgtctgcagcgcgatcaggatctgctgcgtcagacgctcctggacctgcggacgttgggcgaagaactgcacaatgcggttgattttcgacaggccgatcaccgaatctttcgggatataggctaccgtcgctttaccatcgatggtaacgaaatggtgttcgcaggtgctggtcagggtgatatcgcgcacggtgaccatttcatcgaccttcattttgttttcaatgacggtgattttcgggaagcgagaataatccagcccggagaagatctcatcgacatacattttggcgatgcgatgcggggtctccatcagactgtcatcactcagatccagattcagcagttgcataatctcggtcatatgaccggtaatcaaacgcttgcgtgtttcgttatcaatttcttgtactggcgcacgcatcggcgtctccagcccacgagcgaccagcgcttcatgaacgaggacggcttctttactcagtgatgacatttatgtttctcctgcaggtgtggcgctctttgctttttctgggggcaaagtttgtattcattgtgcgtgaggtggcgcacagaatccagtagccgtaacgataattattgaaattggcgctgccttttattagggagcgaagccatgcctcaggcgcaacgccaaatccttatcgccgtatccggaatgttccaaccgctgtacgcattcataagcgccgtcgctacaccggcatgttggctataagttgcattaatgatgcagtaagttctcaaaaggagaaagtgaaagttgctcaccggctaatgaaatatctgtattatgaacgtttacgcgcacatcccttccgaggagccttgcatggaactgcttgaagagcatcgctgttttgacggccagcaacaacgctggcgtcatcactcccctgtcctgaactgcgccatgacgttcagcatttttttaccgcctgagcgcgaaacgccgccgccggtgctgtactggctgtcggggctgacctgtaacgatgagaactttaccaccaaggcgggcgcccagcgcattgccgccgagctgggcatcgcgctggtgatgccggataccagcccgcgcggtgacgaggcggccaacgacgacggttacgatctcggacaaggcgccggcttctacctgaacgccaccgaggcgccctgggcggcgcactaccgaatgtacgattacctgcgtgacgaactgcccgcgcttattcgtagcgagtttagcgtcggcgaacgctgcgccgtcagcggccactcgatgggcggccacggcgcgctcattatggcgctcaaaaatcccggccgctacgccagcgtctccgccttcgcgccgatcgtcaatccctcccaggtcccgtggggcaagaaagcgtttaccgcctatctcggcgcggatgaatcggcatggcactcctgggacagctgcgcgctgatgcaggccagccggccggaggacgccgtgccgacgcttatcgatcagggcgacaacgatcctttccttgccggacagctgcagccggcggtactggcggaggtcgcgcggcagaaggcctggccgttaacgctgcgcatccagcccggttacgaccacagctattactttattgcctcgtttattgaagaccatctgcgcttccatgcgcagcatctctttggctaaacgccaatgcgccgcgaagctgcttcgcggcgcatgttcaggcctacaggacgcgttttagcgccggcaatcagaagcgataatccaccgccataaagtagcgacggccttcttcggtatagctgtagtcgtcccggctcagatctttatcacccacgttctgcaccccggagcgcagtttcacgtttttggtcacctgccatgccgcgccaacgtcaaacagggtgtagccgcccggcgttttgccggtggcgctcaccgcgcgctgctggccggtatagttggccgtcacgtagaaggaccaatcgtccagcggtttccagtcgagcgtgccgttggcggtatggaacggcagcgtctgcagcggtttgtcgccgccattgctcagatcgcgaccatcgttgtaggtgtagttcaccgtcagcttccactcatcgccaaacgggatcttcacctccgtctccacccctttgatgcgggctttgttgacgttgaaatagcggaagatcggcacgcgcttgccgttgacggttttccagccgacaaagttcgggtagcccggcgcttcgctggcgctggaggtgcgcagaacgtcgatcatgtcgtcgacattattctggaaggtggtgatgctgccttcgacattttcaagccagccctcttccccgcggtagtagagaccgagctcgaagctttcgctggtttccggtttcagatccgggttaccgacgatgctgcacgagccgcgacaggagttggtggtccagtcggggttaagctgcagcagcgacggggctttaaacgccgtcgcccagccgcctttgacggtgacggtatcggtggcgttatacaccagataggcgcgcgggctccagtgatcgccataggtctgatggtcgtccatacgaatgccggtggtcagcgccagcggctcgatgatgcgccattcgtcttcgataaacagggcgtactggctggccgacgttgactggccgccgctgctcaggttgaccggatctttcagtttgtcgtggcgccattcgccgccgaaggtcaccagctggttaatcatgcccagcggcaggacatacttgccgtcgatggcattgctttccgaggtaatagtcccgctctgccctggatttttgttatccaccttttcgccgtagaacttgagctcgctattgccgatatcccagcggccgttatggctcagagagtagttctcccgctcaaggcggttgcggtcaagggaatcggaatcgcgatcctgacggtcaaagccgtagcctgcggtaaaatcgtggttttcgttcggcgtccaggcgaattcaacattgccatcgcggctggtgaagccctcgatgcgcggcgtctcgccggtggcattactggatgactgcggatcgtccttggcgcgttttgccaggctgccgtaggccttcattccaagtacgccgtcgatcagcgggccgctggtgaagaactggccgttataggtatccccgcgatcgcggtgctcctgaatagtggtatcagcactcagcgtcccggtccatttctggccgatttttttggtaataatgttgaccaccccaccgagcgcatcggagccgtagagggaggacatcgggccgcgcaccacttcgatacgctcaatagcatccaccgggatccagttaaggtcgaagtcattgtggcggaagacggcgttccgcgagttaacgcgcttgccgtcgaccaggatcagggtatagctgctgctcagaccgcggatgctaacgcccttgcggttatccccttcgttggtgagctggaccccaggcacatcgcgcagcacgtctttcaggttctgaacaggcttgcgttgtaaatcctgttgggtgatgacgctgatgctcgccggcgcgtctttgacattctgttcagtggccgaggcggtcaccaccagcgtttcttcattcacatcggccagagccggaaacgccaacgatacgacggacgcagacaatcccgcccggataaaagggtttaacctgaacattccaaatctccatgaggtgtacaaccaaacaaacaacaaggtgctgctcacacgcgctggcggcttgccgctctgtcggcggcatgctcgcgctgttttctcgtcgatgtggctggtcgcccggtgtcagtctgtacaagcggcagagacggggagtggcttcatccgtaatgggcgaaaatgataaagataatgattacgattatcaatataattatgaagaattgtgacaagctgtaaccgcacaaacataaaaaaagccctctgttcagagggcttccgggtgatgacaaatctgtcttcgttattgtgctcacatgtctgccgggtggcggctttcgccttacccggcctacaaaaatagcaatatcaatcagttacgcggttatctgtaggcccgcgcaagcgcagcgccgccgggcaatccctgaagattgcactttgccagcaatataaagccctcttcacagagggcttttatcgcacaatcgcgaagattaacgcttaaagcggtccgggaaggtcatttcgctgtagcgaacaaagcgggtgcctttcgccagcttgtaaccaaaccagatgacgaggaacagcggaataccaatgtaggtcgccgccacgccgccccagtcaatggtgtccttgaggaacgcttcgtagttctgtccgagggtgatgatcaggcacagcacgaaggcgaagatcggccccagcgggaagaacccggaacgatacggcagattattaatatcgttaccctgcaggacgtagccgcgacggaaacgatagtggctgatcgcaatacccagccaggcgataaagcccgtcatcccggaggtgttcagcagccacaggtacaccgtctggttgccaaacatggaagtcaggaagcacagcgccgcgatcacggtggtcgcgtacagcgcattacgcggcacgccgccacgcgacagcttcgagaaaatacgcggcgctttaccgtcgcaggccagggtgtacagcatacgcgtggaggcgtacatcccggagttccccgccgacagcacggcagtcaggataacggcgttcatgattgccgccgccgacagcaaaccggcatgctggaacaccagggtgaacgggctgacggagatatccttcacatcgttgcgcagcagactcggatcggtatacggaatgatcaggctgataatcaggatcgcgaagacgtaaaacagcaggatacgccagaagacctggcgcaccgcgcgcggaatgttcttctccggattttcagattcaccggcagcgatgccgataagctcggtgccctggaacgagaagccgacaatcatcgccacgccaatcatcgccgagaaaccgccggcgaacggcgcatccgcgatcccccagttgctccagccggctggctgcgcccctttgaagatgccgacaatcatcatcacgccgacgatgataaagataatgacggtggctacctttatcagcgagaaccagtattccgcctcgccaaagccgcgcaccgagatccagttcagcaggaacatgatgccgaggaacaaggcgctccagatccagcccggagtgtcagggaaccagtagctcatcaccagctgtgaggccacgaggtcaacggcgatcgtcaccgcccagttgtaccagtagttccagcccagcgcgaagccgaagccttcttcaacataattctgcccgtaggtggcgaaggaaccggataccggcataaacgccgccagctcgccgaggctggtcatcaggaaatagaccatcaaaccgatcagaatataagacagcagcgccccgccgggacctgcttgcgaaatggttgcgccagaggcaacaaaaagacccgtaccgatggaaccgccgatggcgatcatggtcaagtggcgcgccttcagttcacgacgtagcgtgggcgcttctgtggttttagattccgaaaccatgtgataatgctatccatccaaaaaatgaggcgcgattgtagcagacgatcggggttccatccggtacaaatgcaaagttataagagagcttcatgatcgcccgcaaattattagtaaagcactaacctgcggaattgccagcgaattccccccgtaatcaggcgataaaaccgggctgctacacctggcaatagtgcagaaaacgttgtaatgctttagaaatatgcttctgccggtgatggatccgccacagcgtgcgcgtcagccggggcaatggcactttcagctccgccagcgtgcccgaggcaagctgttcggcaatcacccgccgcgatagacagctgatgcccaggccatgcctgaccgcgtgcttgatcgcctctgaattacccagctccatgcccagatgaaacgccggcagatgcgacagcagaacgtaatcgacaatctcccgggtgccggagccatgctcgcgcaggatccacggcgcctcggccagttgctgcagggtcacctcccccgccagcagcggtgagttgggcgcggcaaacaccaccagctcatcctccagccacggctcggcaataatatcggcggcatggcacggcccctcaatcaggccgaaatccacccgcaggtcggcgacggcgttgatgacgtccaggctgttgccgacgctcagctcgaccggcagatccgggaagtcatgacgatagcgggcaataatctccggcataatatagttgccgatggtgctgctggcgtagacccggatcgccccgttatcgccgcgaaacagctgctcgatctccagggcccgctccagcagcgccagcgcacgcgggtacagcagccgtccatgctcattcaccaccagtcgtttaccgacgcggtcaaacagctgcacgccgagctgcccttccagatcggtcagcgcggcgctgaccgcggattgcgaaagcgccagcatctgtgacgcctgagtggtcgacccactcttgtggacttcggcgaacacttccagctgccgcagcgtaatatgcataacccacccgtttagtaatccaacctgaataaccttccttactatggtgacacaaatcgaggcggctgacggaaggaaaatccgcttatatcacaaaatcatcgtcttgccggcgagaccgccccgcttctgcctaacccgctctcgccccgttgtaaccggcgaagcggccattaaccacttattacgattgattataaacatataatcaattttatatttaatcccgcgcggcgtaacctttaggcagacaaaggagaaggttatgacagcactcactttacccaccaaacatcgttccctgtggcattttgtcccaggcctggcgctgaccgccgctctgaccggcgccgccctgtgggccggtagtttcccggccatcgccggcgcgggctttagcgccctgaccctcgctatcctgttcgggatggtcgtcggcaacacggtctacccgaaaatctggcagccctgcgacggcggggtgatcttcgccaagcagcatctgctgcgcctggggatcatcctctacggctttcgcctgacgttcgcccagattgccgacgtcggcgtgagcggtattttgattgacgttctgacgctctccagtacctttttcatcgcctgcttccttggccagaaagtgtttggtctcgataaacacaccagctggctgatcggcgccggcagcagcatctgcggcgcggcggccgtgctcgccaccgagccggtggtcaaagccgaagccagtaaagtgacggttgccgtcgctacagtggttatcttcggtaccatcgccatcttcctctacccggcgatgtacccgctgctggcgcactggtttaccccggagaactacgggatctatatgggctccaccatgcatgaagtggcgcaggttgttgccgccggccatgcggtcagcccggacgcggagaacgcggcggttatcgccaaaatgctgcgcgtcatgatgctggctccgttcctgctgttcctggcggcgcgtgttaaacagctgaccccggcaggcaacggcgagaaaagcaaaatcaccattccgtggttcgccattatgttcatcctggtggcggtgtttaactccttccatctgctgccgaaagccgtggtggatatgctggtgacgctggataccgtcctgctggcgatggcaatggccgccctcggggtcaccacccacgtcagcgcgctgaaaaaagccggggcgaaaccgctgctgatggcgctgatgctgttcgtctggttgattgtcggcggcggggtcattaacgtcgctatccacagcctgatggcataaagcactacatctttctccagttaagccgctatcattacccacccccagcggctttaactggagttttttttatgaaatacgtaggagcgcacgtgagcgcctcaggtggactggccaatgccgccattcgcgccgccgaaatcgaagcaaccgccttcgccctcttcaccaagaaccagcgccagtggcgcgccgcgccgctcagcgacgagaccatcgccgaattcaaagccgcctgtgaaaagtatcactttggcccggggcagatcctgccgcacgacagctacctgattaaccttggccacccggtggaagaagcgctggaaaaatcccgtgatgctttcattgatgaaatgacccgctgccagcagctgggactgacgctgctcaacttccaccccggcagccatctgcagcagatcccggaggaggagtgcctggcgcgcatcgccgaatcgatcaatatcgcgctggcgaagaccgaaggcgttactgcggtgatcgaaaacaccgcaggccagggcagcaacctcggctttaagttcgagcacctcgcggccatcatcgacggtgtggaagataaatcccgcgtcggcgtctgcatcgatacctgccatgctttcgccgccggctacgacctgcgcagcgccgaagcctgcgaaaaaaccttcgccgccttcgaacgcatcgtcggttttcagtatctgcgcggcatgcatctcaacgatgccaagagcgccttcggcagccgggtcgaccgtcaccacagcctgggggaaggcaacatcggccacgattgcttcagctggatcatgcaggacagccgcttcgacggtattccgctgattctggaaaccatcaacccggatatctgggcggaagagattgcctggctgcgggcgcagcagattgccgaagtggcgtaaatagagacaaaaaaagggccgaacaatcggcccttttttattgcggtaggattatgccgctttttcaacttccgctgtttgcgcctcagggcgtttcagcacggcgtaggcaaggcccgccaccagcgttccggcaacaatcgccagcaggtagcccagcaccggcgtaatcgcccccgggatcagcagaacaaacagcccgccgtgcggcgccatcagtttcgcgccgaccgccatggagatagcgccggttaccgcgccgccgacgatacagcacggcagaacgcgcatcgggtcacgggcggcaaaaggaatcgccccttccgagataaagcacaggccaagaaccagcgcggctttgcccccttcccgctgccctttgtcgaacttattgcgcgctaccagcgtcgcgatacccatcgccagcggtggcaccataccggccgccatgatcgccgccatcggcgcataggtctgggtactcagcaggccaacgccaaaggcataggccgctttgtttaccggcccgcccatatcggtacacatcatcgcgccgaggatcgcgcccagcagaaccgcgttggcggtgcccatggtttgcagccagtgggtcagccaggcgaggataccggctaccggtttaccgatcagatagatcattgccaaacccacgatcagactggagaccagcggaatgatcaggattggcttcagggcttccatactctgcggcagtttcagcttcgtgctgatggctttcgccacataaccggcaaggaaaccagcgatgatcccgccgataaagccggagccgccgctaaccgccagcataccgccgataaggcccggggtcagacccggacggtcggcaatggagaaggcgataaagcctgccagtaccggcaccatcagcgcgaaggccgagccgccgccgatctgcatcagcgccgccgccagggtgtctttcacttcaaacgctttgatcccgaaggcaaaggagagcgcgatacacaggcccccggccactaccatcggcagcatataggagacgccggtcagcaggtggcgataggcgcccgccgactcttttttcccttcagcagccgcctgaggtttgccggatggctggtacggtttggcttccgccaccgctttatccagctcctgggcggttttcttcagcgccagaccggtggtggtgcggtacatcggcttgccggcgaatttcgccaggtccacctcgatatcggcagcgacgagcaccagatccgcctcggccacctcttccggggtgatggcattgcccgccccaacggagccgcgggtctccaccttcacccaccagccgcgttttttggcttcggtttcgatggcttctgccgccataaaggtgtgggcgacgccggtcggacaggcggtgaccgcgacaatgcgtttctgcccctgagcggcggccggaacggctaccgccgctggcgcaacgtagggcttagcgtggtctttcgcttctcccaggaacagctccggatgggcgacagcacggttaatatcgcccaggtaaacgtttttaccattcagcgcgctatcggccggcagcgcggttcccagcacgatggccagttcggcgtcattcgggttatcaatcagctcaaggtgcgctttcggcgccgcggcacccagcagggttttcgccatgtaggcgcgcgcctgtccgagtccggcatcaataatcagcagcgttttcattatgcctctcctgctgtcaattaaagggttgtaagtcgacgcgcgccatcatcgcggccaactgggtacggtcggtaattcctacattgctctggctgacggccagggcagcgacggcggtcgccaggcgcagggtatgctcgctggattcacgcatcagcaggccgtaaatcaggccgccgaccatcgaatcgccggcgccaacggtactgactacttccactgaaggtggtttagcaatccactccccagaggcgttgacccacagcgcgccctcttcgcccagggagatcaccacgtgggcgataccctgctcgcgcagcgcatgggcggcgtcgataacatctttcatctccggcagcttgcggccagcccagatttccagttcgcgacggttcggtttcaccagccacggcgccgcttttagtccggcaaccaacgcttcgcggctgctgtcgaaaatgatgcatgggcactgactgcgcagacgggtcatccagtcggtgaaggcttccgggctaacgccggacggcaggctgccgctgacgcagaccatatcgaactgcccgagccagctcagggagtcgttgacgaagcgttcccagtcgcccggggtgacttcaaagccggagaagttgaaatcggtcacttcgccatctttttccgtcagcttaacgttgatacgggtccggccctgcaccacctggaaacggttggcgatccccagctcgctgaacagctgctgaaagccgtcctggttgtctttacccaggaaaccgccgacggtgacgtcaatgccgagatctttcagcactttcgccacattaatgcctttcccggcggcgtgcaggccggtggtgcgcaccaggttcacttcgccgcgttcaatctccggggtgaatcccaccaggtcgtatgccgggtttaacgtaatcgttgctacacgtctgctcatttatgcgccctccccaaggcctgcggcgatcgcttcgccaatcgcatccagcgcttgttgcgcatcctcaccctgcgcggtaaaacgcagacggtgaccttttttcacacccagcgccacaaccttcatcaggctgcgaccgttagccggcttgccggaaccgtcgagattggtgacggtgatgtcgctggaaaattgtttaatggtgttgaccagcatggtgcccggacgggcatgcaggccgtgttcattgcgcaccacgaattcggcgctcagcacatcttcggcaatggcgtcgtcgctggtcagcagcgccagcacggtggcggcgtcggctttcagcaaatgttcagctttcttgtccagcagcagcttgctcagacggttcagcactgcggtcggctgctcgtcggccatcgccaccgtgaccagcagggaaaccggctgctcgtcgcgggtaaaggcgttagccgcgcggctgaccgccacggcgctgcgcaaattgccttccgcactgtcgttcagccagacgccctgaccgaggttcagcggcgtatcgttaatgacgtggctaacgaaggcggcatcgacagcgccaacttctttcagacgcgccgcgttcagcgcctgcagggtcagcagatcgctggccgcgacgtcgagactgagggtctcgttatccagcttcagcgcttcgctctgcttctctcccatcagcagcgcgcgcagctcttccgcggtggtggcggactgcagctgcgcggcgaccgcgtcatcgctcagcacgtgggtcagctgacgcagcaggccgaggtgttcatctgagctggcggcaatcccgatcgccacataggcggtctgcccttcgccccaggtgacgccctgcgggaactgaaacacctgaacgccggtcttcagcacctggtcacgcgtatccgtcgtgccgtgcgggatcgcaatcccgttgccgaggaaggtcgaggtctgctgctcgcgcgccagcatgccgttcacgtagccatcggccacgttgccggcgctgaccagcgcggcggcgacctgccggatggcctcttctttattaccggcctgctggccgggatgaatatcctgcacagataactggaacatggttctcctctcctgctgaattgaatcgtttcagctaacttgagaaaaaaggcgccatctgacggggaacggattgccgaatgacgctgaaacgtttcaagaattttgtacctttcttgctcaacgcgcaaggtacgtcagctacttgatcgcagaacttagaggtactgcacacttttgctgaagcattagctatcgaccgcctcgaacgtcagctttttgctgaaccctatattttgaaacgcctttttaattattcgtgccatactactgtttatttttagccagcaggcgtaaactccgcgccgtctcctgaaactacagaaaaccaaacccatggaaaaccgtagcgccgctctcccccgacgcgggttcgatgtcacctcttccgccttcttaatcgtcgcctttctgacgggcattgccggggcgctgcaaaccccgaccctgagcctgtttctgaccaacgaagtgcacgtccgcccggcgatggtcggtttcttttttaccggcagcgcggttattggcattctggtcagtcagttcctcgccggccgctccgaccgtcagggcgatcgcaagcagctgattgtcgtctgctgtctgctgggggtgctggcctgcgtcctctttgcctggaaccgcaactatttcattttgctgttcatcggcgtttttctcagcagctttggatcgaccgccaacccgcagatgtttgccctcgcgcgggagcatgccgacaggaccggccgcgaagcggtgatgttcagctccattttacgtgcccaggtctccctggcatgggtgattggtccccgctggcctacgccctggcgatggggtttggttttaccgcgatgtatctcagcgccgcggcggcgtttatcgtctgcgggatcatggtctggctattcttgcccagcatgcgcaaagcaaagccggtagcgaccggccggctggaagctccgcgcacgcatcgccgcgatgcgctgctgctgttcagcatctgcaccctgatgtggggtactaacagcctgtacatcattaacatgccgctgtttatcattaacgagctgcatctgccggagaagctggcggggctgatgatgggcaccgccgccggactggaaattccgaccatgctgattgccggttactacgcccggcgtttcggcaaacgctttctgatgcgtctttctgcagtggccggggtgctgttttacgtcggcatgctgacggtgcatacgccagcgctgctgctggcgatgcaggtgctgaacgccatctatatcgggatcctcgccgggatcggcatgctctatttccaggacctgatgccggggcaggcgggagcggccaccaccctctataccaatactacccgcgtcggctggatcatcgccggttcactggcgggggtagtagcggagatctggagctatcacgcggtgttctggattgcgctggcgatgggcgttgtcactcaggcctgcctgtggcggataagagacgtgtaagcacattggtttccatccctctcatctgctgcgttgagctcagggcgcggtggccagctcaagctccagcagccaggtgatcgcttcatcgcggtgggtgaggcacatctccggcgagggctgcaggctggcgcacaccttcgggcgcagaggggagccgaaaataaggcataaattgcgctcggaaagctggatacaacgggtgttagctggcttgccctgcggcatgccggggatcggcgatgatatagagggggcgatgcaacatgcgccacaatcagtacgacattccacaacccgactcccaaacgctcattttgcgccacagcctaaacgttttgccagaagatagcaaaactcgcgaaatccgcttgcctgaacgcccgggcgcgagtagttttacgcgatatttttgactcgttaagtgacaggattactgcaatgccaagagcgaatgaaattaaaaaaggtatggtgctgaattacaacggcaagctgctgattgtgaaaaatattgatattcagtcacccagcgcccgcggtgctgcgacactgtataaaatgcgcttctccgatgtgcgcaccggcctgaaagtagaagagcgcttcaaaggcgacgatatcgtcgataccgtcaccctgacccgccgtttcgtcgacttctcctacgtcgatggcaacgaatacgtgttcatggataaagaagactataccccttacacctttaccaaagagcagattgaagaagagctgcagtttattccggaaggtgggatgccggacatgcaggtgttgacctgggacggccagctgctggcgctggagctgccgcagaccgttgacctggaaattatcgaaaccgcgccgggtattaaaggtgcgtccgccagctcccgcaccaagccagccaccatgagcaccggcctggtgattcaggtgccggaatacctgaccaccggtgagaaaatccgcattcatatcgaagagtgccgctatatgggccgcgcggattaatcatcggtaacgccccgacagtaaaaaaggacagcgctggctgtcctttttattatccccattgccgcgattacagcagttcagggtatttggtcattttcagcgccagctcgacgccgcgcacttccgccatccccttgagacggccaatcgccgaatagcctgggttggttttcttgcgcagatcgtcgagcatctgatgaccatgatccggacgaaatgggatcgggcgcagatcgccggcctgtttacgccgctgctcttcacgcaggatagcatccaccaccgccaccatattgacgtcgccgctaaggtgcgccgcctcgtggaaggtttttgggtttgcttcacggcaggtagagcgcagatgggtaaaatggatgcgatcgccaaaggtctccaccatcttcaccagatcgttatcggcgcgaacgccatacgatccggtacacatggtgaagccattattaatgctatccaccgtctccttcagccactgcatatcttcgatggtcgacacgatacgcggcaggccaaggatcggccgcggcggatcgtccggatgcacagccaggcggatccctacctcttcgcataccggcacgatggcgcgcaggaaataggccatattttcacgcagctgcgctttatcaatgtggtcgtactccgccagacgcgcgcggaactggtcaagggtgtagccctcttccgctcccggcaggccggcgatgatattgcgagtcagtttatcgatatctgcttcgctcatcgccttgaaatagacctcagcctgacgctgctcttcttcactgtaatccgcttccgcacccgggcgtttaaggatatgcagctcaaaggcggcgaaagcgatctgatcgaaacgcagcgcccgggagccgtccggcagctcatattccagatcggtgcgcgtccagtcgaggatcggcataaagttgtagcacacggtatcgatgccgcaggccgcgaggttgcggatgctctgctgatagttggcaatccaggtcgcatactgcccgctgtgggttttaatatcctcgtggacgggaatgctttcgacgaccgaccaggtcaacccttttgccgctaacagcgcctgacgcgctttaatctcgtcgaccggccatacctgaccgtttgcaatatggtgcagcgcagtgacgacgccggtcgcccccgcctgccgtacatcatcaagcgataccggatcgttcggcccataccaccgccaggtttgctccatcgctatgccctcacaaaagttgttataccaataatggcgacactcatgacgactaccatacatgtttctcacctggctgcaaacagtgctggcctattgattgatccagctcacagtcagcggataatttcggcttaccaatttaacttcctgtcatataactttagactggcattgttaataagcagttaaacaggtgtgggaagaatgacaacaattgcaaccgctacgctaccgaagaacgtgcaataccctcaatacgatcgcagccagctccgctcgcgtattgtccatttcggctttggcgcgtttcaccgcgcgcaccaggcgctgctcaccgatcgcgtgctgaataacgtcggcggcgactgggggatctgtgaaatcagtctgttcagcggcgacacgctgatgagccagcttcgcgaacaggaccatctgtttaccgtgctggaaaaaggcgccgacggcaaccagcccattgtgatcggcgcggtgcacgaatgtctgaacgccaggctcgattcgctggcggcgattatcgaaaaattttgcgagccgcaggtagcgattgtctcgctgaccattacggaaaaaggctactgcatcgatccggcgaccgggaaactggatccgacgcatccgcgcattattcacgatctggagaatccgacgctgccgcagtcagctcccggtattttagttgaagcgctggcccgccgccgggaacgaggccttccgccctttaccgtgctctcctgcgataatatccccgacaacggtcacgtggtaaaaaatgccgtcctcggcatggcggaaaaacgcagcccggcgctggcggactggatcgccgacaacgtcagcttcccgggcaccatggtggatcgtattgttcctgcggccacaccggagtcgctggcggaaatcgccaccgtgctgggggtcgacgatccctgcgccatcagttgcgaacccttcattcagtgggtggtcgaagatcactttgtcgccgggcgccccgcctgggagacggcgggcgtgcagatgaccgatgacgtgttgccctgggagcaaatgaagctgcggatgctcaacggcagccactctttcctcgcctggcttggctatctggcagggcatgcgcacattagcgactgcatgcgggatgacgtcttccgccgcgccgcccgccagctgatgcttgacgaacaggctccgacgctgaccattaccggcgttgatctgctggcctatgccgacagtctcatcgcccgcttcagcaatccggcgctcaaacaccgcacctggcaaatcgccatggacggtagccagaagctgccccagcgcatgctcgatggcatccgcgtacatctggcgcgcgacagccgttggccgctgctggctctcggcgtggccggctggatgcgctacgtcagcggcacggacgacgccggtcagacgatcgacgtgcgcgatccgctggtcgacaagatccggcagcgggtggcccagagcgatgagcagcagcgcgtcgacgccctgctggggctggaggaaatatttggccgcgacctgccgcacaacgcccagtttgtcgccgggatccgcgccgcctggcaacagctggcgacgcacggcgcccgcgaggccgtcgcccgcgcgctgaattcttaacaatatttgcgcttatgcggacagaattctcttctgtccgcctcaggacttctcttttcccccttttttcgtcaggataggcgtaactgttacaacattacatttatcctggagaaaagagtgaccagaaccaatttgatcaccggctttctcggcagcggtaagacgacctcgattcttcatctgctggcgcagaagcctgcggatgaaaaatgggccgtactggttaacgagtttggcgaagtcgggatagacggcgcgctgctggccgacagcggcgccctgctcaaagagatccccggcggctgcatgtgctgcgtcaatggcctgccgatgcaggttgggctgaacaccctgctgcgccagggcaaacccgatcgcctgctgattgaacccaccggtttgggccacccaaagcagatcctcgatatcctcaccgcggcggtgtatgagccctggatcgatctgcgcgccaccctgtgcatcctcgatccccgccaactgctggatgaaagagccgtcagcaacgacaacttccgcgatcagctggccgcggcggacatcattgtggcgaataaaagtgatcgggaaaccgccgaaagcgcccgggcgctggccgactggtggcagcgctggggcggcgagcgcggagcacgcccaccgccatccccccacttccggcctcgccgcgctcagcctggcggaacaccagcgctggcgccgccatctcaacaatggccagggctatcagggctgcggctggatcttcgacgcggagacggtctttgacaccatcggcctgctcgaatgggccaggctggcgccagtggggcgcgttaaaggcgtgatgcgcattgccgagggggcggtgcgaatcaaccgtcagggggaggatctccatatcgagaccctcagcgtcgctccgcccgatagccggatcgagcttatttccgcgaatgaagccgactggaacgcactccagacctcgttgttgaggcttcgtttaagttaaggcggctaaggttgccgccgactgtcacaaaatcgcaatggctatgatgaaaaaccgaattcctttaatcctgctgcttaacatcgcgggtgtagcgctattttgctcctggtatctgccagccaaccatggcgcgtggttgccggtcgactccgcgatcttccatttctttaaccatggcgtcagcgtcagccatgcttatgcctggctgctggcgatcatcaacaatcgcgccttcgacgcctgttcgctgctggcgatgggctgcctgatgctgagctattggctaaaggcgccgactgcaggccgtcgtcagatcgccatcatgggcctggtgatgctgctggcggcggtgatcatcaaccagctcgcacaacacctgatgccggtacagcgcgccagcccgtcgctgttttttagcgatattacccgcgtcagcgacgtcgttaacttccccactaaggatgcgtcgaaggacagcttccctggcgatcatgggatgatgctgctgatcttcgcgagctttatgtggcgctattttggccgtcgcgcgctgggcgtcgcgctgattatctttgtggtctttgctttcccgcgggtaatgattggcgcccactggtttagcgatattgccgtcggctccctgaccgccgtgctgatcggcgcgccctgggtattgatgaccccgctgagcgataaattgatcgcctttttcgatcgctacttacccagcagaatatcggccaaataatgtctccggcagccgccagagtcattaactataaggggaccttttgggtccctttttacattttcccttttttcaacatgacgttcatcttcttgtcacattaatcccgtgacaaatgaaggaattgtctgttttttgcccgatattgccgtaattttggcctttcccgatgattcactttttgtcaccaaaatacttataagaaatcgcgcaaaaccgctcgccatgcggcgtttgatagggtaatctcgttctcgttttgccttttccgcagcattaattcagggcatgaataaaattgtgcgtgactgcacaaatttaagcttaaggaattgtctcattgcggatgggtatttaggctctaacacgtttggcattttttataacgacattgtcgttaaggacaacaagggaaaataaacagcatggtcaaatctcagccgattttgagatatatcttgcgggtagcccccgcgattgcagtagcggttctgctttccgcgtgtagttcaacaagtaccgccaggaatatgcattctgagacgcatgctgtgggtagtggcgatttatcatcactgcaagcctctcaggatgaatttgaaacgatggtccgtaacctggacgtaaagtcccgtttaatggatcagtatgccagctggaaaggcgtgcgttaccgcctcggcggcagcacccgcaagggtatcgactgctcagcgtttgtgcagcgcaccttccgcgaacaatttggtctggaactgccgcgttcaacctctgaacagcaggaaaccggaaaatcgatttcccgtgcccaactgcgtacaggcgatctggttctgtttcgcgccggctctaccggccgccatgtcgggatctacctcggcaacaaccagtttgttcacgcctccaccagcagcggggtgactatctccagcatggatgagccgtactggaaaaagcgctacaatgaagcgcgtcgagtcctgagccgctcgtaaactgtcctctaccgccgccggttatcccttggctggctgcgggataaaaaacactgccccaggcagtgtttttttttgccacctggttctcaacgtcgcaaaataagctatgtcttttaagtgggaatgagaaaaacgacgaccgacactccgttgatgcgcttcaataacacggaaagaatctggctatgcttactcgctacttttcgccccagcgtaaaacctggttaaccagcctgagcgtggggatcatcgtcgcgctgttggccgggagcattcagtttatggtgatctaccataaccgggccgagcgtttcgacgccattatcaacaatgttaatacctatctgaaaagctattttcacgacctgcgccagaccattgacggcctgcagccgctggtggaccagccctgcgagaatattgactccgggcttacctcccacgccgcgttcagccccaacgtccgcgctttcctgctggtcaaaaacggcatcgccttttgctcatcggctacgggagccatgaatacgcccctcagccagctgatcccggccatcgatatcagcaaacccgttgctatggcgattttaccaggcacgccgatgatgccgaagagcgcggcgctggcgctgtgggtaggtaaacccggcgatcaaaacagcggcattttcgtgtcgattaacgctaatctcacaccgtatatcctctattccgcgcggcaaaacgatttcagcggcattgcgctggccattgatcacaccgctatctccaccttcagtaatcggctggtggatccgcaaacgctgcataacgcgccgatccgccaggcacagatcgagggcttaccgctgaaggtctatctgtatgccaacagctggctggcggaaaatacgcagtttgctctgctgctcggggtcgtctgcggcctgctggcggggctgctctgctattacgtgctgacgatcaaatcggatccgcgaaaatccattctgctggggatcaaaaataaccagttctacatcgtttatcagccggtggttaatgctcagactctacgtatcagcggcgtggaggtcctaatgcgctggcgccatccggtggttggtgaaattccgcccgacgtttttattaacctggccgaaacccagcagatgatcgtgccgctaacccatcacctgctcgcgctgatcgccagcgacgctgcggtgttgaagcgtattctgccgcgcggcgtgaagctggggctgaatatttcccctgcccatctgcaggccgacagcttccgtgacgatatgctgcgcttcgccgccgcgctgccagccgaccactttcacgtggtgctggaggtaaccgagcgggcgatgattgataaagaaaaatcgatggctaacttcgcctggctccaccgccagggattcgaaatcgcgattgatgatttcggcaccgggcatagcgcgctgatctatctcgaacggtataacttcgattatctgaagatcgatcgcggttttgtgcaggcgattggtactgaaacagtaacctcgccggtgctggatgcggtactgaccctcagccgccggctgaaattaatgaccgtcgccgaaggggtggagacccaggaacaggcggagtggcttcgcggccagggcgttcatttcctgcaggggtactggatcagccgaccgctgtcgctggccgggctggtggctgcgcacgatgaacccgcgaactatttcacaacgcgctaagtctcacttatgatgcgggaacggatgtcggccatgggggccggccatgacagggtattctgccgcctatgtatgcgcgcctctttctgattctgctggctctgtttagcctggacgctaaggcgcaaaccattcaggaaagcgtagccttcgcgattatcggcgaaccgaaatacgccgccggtttcagtcattttgattacgtcaatcccagggcgccgaaaggcggcaccctcaccctggcggcgatcggcacctttgataacttcaaccgttatgcgctgcgcggcaaccccgcggtacgcacggaggcgctctacgataccctgttcaccacctcggatgatgagcccggcagctactacccgctgattgccgagcgggcgcgctatgccgaggactattcctggatggagatcgcgctcaacccgcgcgcccgcttccatgacggcacgccgatcaccgcccgcgatgtggcgtttaccttcaacaagtttatgaccgaaggggtgccgcagtttcgcctgttttataaaggcaccaccgtgaaggccatcgcgccgttgaccgtgcgtattgacctcggccagcccggcaaagagaacatgctgagtctgctgagcctgccggtgatgcccgaggcgttctggcgccagcacaaactcagcgacccgctgtcgaagccgccgctggccagcgggccataccgcatcagcgcctggcgaatggggcaatatattacctattcccgcgtcgccgactactgggcggccgacctgccggtcaaccgcggtcgctggaatttcgatacgctgcgctatgactattatctcgacgacaatgtcgctttcgaagcctttaaagcgggagccgtcgatcgccgggaagagaccgtcgccaaaaactgggctacccgctacgtcggtcgcaacttcagccgcggctacatcattaaagatgagcataccaatacctcggcgcaggatacccagtggctggcgttcaatattcagcgcccgatttttgccgatcgccgggtgcggcaggccattaccctggcgttcgatttcgaatggatgaacaaggcgctgttttacagcgcctatcagcgcgccaacagctatttccagaacaccgaatatgccgcccgcagcctgcctgacgcagccgagctggccctgctgacgccgatgaaaaacgaactgcctccggagctcttcagccaggtttaccagccgccggtctcccgcggcgatggcttcgatcgcgccaacttactcaaagccgacgccctgctcaatgcggcgggctggacggtgaagaaccagcgccgggtcaacgccgccaccggcaagccgctgcgctttgagctactgctgccggccgggggcaatgaccgctgggtgctgccgtttcagcacaacctgcagcgtctggggatcgtcatggatattcgtcaggttgataattcgcagtacagcaaccgccgccgcagccgggattacgacatgatgccaagcctgtggcgcgccatgccctggccggggaccgacctgcaaatctcctgggcgtccgactatattcactccagctacaacgcgccgggggtgcaaagcccggtagtggataagctgattgcgcagatcctgcagtggcagggcaataagcagaaactgatccctctcggtcgggcgctggatcgtgtgctgacctggaataactacatgttgccgatgtggtatatggcgcaggaccgcaccgcgtggtggaataagttctctttccccgcgacccgccccatctattcgtccggcctcgatacctggtggtacgacgtgaacaaagcggccaccctccccgcggacagacgctaaggacatcccatgggcagctacctgatccgccgtttgctgttagtcatccccaccctgtgggccatcatcaccattaacttttttattgtccagatcgcgcctggcggcccggtcgatcaggccatcgccgccatcgagtttaatcagcgcggcgggatgccgggggctggcgacggcggaatgggcgccagccatgcccgcaccggcgcaggcaatatcagcgagggtcactatcgcggcgggcgcggcctcgacccggaagtcatcgccgagatcacccaccgctacggcttcgataaacctctccacgagcgctatctgaagatgctgggcgattatctgcgctttgatttcggcgacagcctgtttcgcagcgcctccgtgctgcagctgattaaagacagcctgccggtctcggtgagcctcgggctgtggagcacgctgattatctatctggtctccattccgctgggcatccgcaaagcggtcagcaacggcagccgctttgatatctggagcagtacgctgattatcattggctatgcgatccctgcctttctgttcgccatcctgctgatcgtgatttttgccggcggcagctatttcgacctcttcccgctgcgcggtctggtctcgccaaatttcgacaccctcccctggtatcaaaagatcctcgactacctgtggcacatcaccctgccggtgctggcgacggtaattggcggctttgctgcgctgactatgctgaccaaaaacagcttcctcgacgagatccgcaaacagtatgtggtcaccgcccgcgccaaaggcgttggtgagaaacagatcctctggggacacgtgttccgtaacgccatgctgctggtgatcgccggcttcccggccacctttatcagtatgttctttaccggctcgttgctgatcgaagtgatgttctcgctaaacggcctgggtctgctgggctatgaagcgacggtctcccgcgactatccggtgatgtttggcacgctctatattttcactctgattggcctgctgctgaatatcgtcagcgatatcagctatacgctggtcgacccgcgcattgattttgagggccgctaatgtctttcttcagtcccgttaatcaggcccgctgggcgcgctttcgccacaaccgtcgcggctactggtcgctgtggctgtttttaattctcttcctatgcagcctgggcgccgagctgctggccaacgaccgcccgctgctggtgcagtaccggggccagctgtacgtcccggtgttaaaaaactacactgagcaaaccttcggcggcgcgttcgccaccgccgccgactatcaggatccctggctgcagcaccagctggcgactcacggctgggcgctatggccgccagtgcgcttcggcgcgacgacaattaattttgccagcacggttccctttccatcgccgccctcagccagcaactggctcggcaccgacgccaacggcggcgatgtgctggcgcggatcctctatgggacacgcatctcggtgctcttcggtctgctgctgacgctgttctccagcgtgctcggggtgctggccggggcgatacagggttactacggcggtaaaatcgacctgtggggacagcgctttatcgaagtctggtccggcatgccaacgctgttcctgatcatcctgctctccagcgtcgtgcagccgggcttctggtggctgctggcaatcaccgttctctttggctggatgacgctggtgggcgtggtgcgcgcggaatttctccgcactcgcaactacgactatgttcgggcggcgcaggcgttaggggttagcgaccggcagatcatcctgcggcatatgttgcccaacgcgatggtggcgaccctcaccttcctgccctttatcctgtgcagctccattaccaccctgacgtcgctggattttctcggcttcggcctgccgctcggctcgccctccctcggcgagctgctgctgcagggcaaaaacaacctgcaggcgccctggctgggcattgccgcatttctctccgtcgccgtgctgctgacgctactgatttttatcggtgaagcggttcgcgacgcctttgacccgagtaaggcggtgtaatatgacccacccgctattagctatcgacaatctctctattgcctttcgccagcagggcgagacgcagaccgtggtgcataatctgtcgctcgaggtggcggtcggcgaaacgctggccctggtgggcgaatccggctcaggtaagagcatctccgccctgtcggtgctgcggctgctccctaccccgccggccagctaccccagcggtgacatccgttttcatggccagtcgctgctgcatgcggatgaggcgaccctgcgcggcgtgcgcggcaaccggatcgcgatgatctttcaggaaccgatggtatcgctcaatcctctgcacaccctggaaaaacagctctacgaggtgctgtcgttacaccggggaatgcgcaaacaggcggcgcgcggggagatcctcgactgcctggagcgcgtcgggatccgtcaggcgccgcggcggctggcggactatccgcatcagctctccggtggcgagcgccagcgggtgatgatcgccatggcgctgctgactcgcccggagctgctgatcgccgacgagccgactaccgccctggacgtatcggtgcaggcgcaaattctgcaactgctgcgcgagctgaagcaggagctgaacatggggctgctgtttatcactcataacctgagcatcgtccgccagctggctgaccgggtggcggttatgcagaacggccgctgcgtggaacacaatgactgtcgggcgctgttcagcgcgccagcgcatccctacacccaacgcctgctggatagcgagccggacggggagccggtgccgctggccgccgatgccccggtgctgctgcaggcggacgatttaaaggtggcgtttcccgttcgcaaagggatcctgcgtcgggtggtcgatcatcatcgggtggtcaacagccttagctttcagctgcgcgccggcgagacgctgggcctggtgggggaatcgggttccggtaaaagcaccaccggcctggccctgctgcgcctgatcccgtccgggggcaagataaccttcgccggccagccgattcaggggcgtaaccgccgacagctgctaccgctgcgccgacagatgcaggtggtttttcaggatccgaactcgtcgctcaatccgcgcctcacggcgcagcagatcattgaggaaggcttgcgcgtccaccagccgacgctgacggcggccgaacgcgaacaggcggtgatccttgccatgcaggaggtcggcctcgacccggccagccgccagcgctatccggcggcgttctccggtggccagcgacagcgtatcgccatcgccagagcgttgatcgtcaaaccgcagctgatcgtcctcgatgaaccgacctcatcgctggacaaaaccgttcaggcgcagatcctgaacctgctgaaagccttacagcgaaagcatcagctggcctatatttttatcagccatgatttaggcgtggtgcgggcgctgtgtcaccaggtaatggtgctgcgtcagggagaggtggtcgaacagggcgagtgcaagtccgtcttcagcgcaccccggcatgagtatacccgccagctgctggcgctaagctgacggtcagaaagggttattgccggagaagggctcggcgatggccacgccaaagtttttcagacgacaggtggcggcaaactcatcctgcaggttaacgaacaggcagggttcgccttcgcactccagcacggaacagtcgacttcgatgtcgcttaacgcctggctgagcttatgcatcaccggccaggctttctcaccgtccgggctcagcaatttcagggcaacgagactgttctcgttctgcgcgccgttttgcggaatcggttcaactctggaacccgcaaaaccggccagccagcgatagctctgcggcagacggtgtacgatagagagttgttgtgtattcacttggtttccccggaagcaaaaggcttcacaataaatttacatcaatattaacacactgttgacaaatagtcctgccttgaggcagaaaacgtttacagcggcggcggaccagggttaagcgcttataatccagcgctttattttttatacccggcgagccgattggcgctatatgtacccgtttctgtgatccaaaacaacttttttatcgcaacaatgcgactttttacactaattgattttacataaaggaaacaaatcgcagaaccctgaagcccattgcggttgacatgcatcaagaaaggggcgatttcgcccctgaaaatgtgacctagcgtgcgatttttcgccgccgggatgcgtaaagcgagaagaaaatagagcaggttgcgcagaaggcaatagagatcagcatcggccaggcggtggtaaacgtcgccatcgacagcagcgcgccgataatcgccccgataccgaaacggaaagtccccgccagcgacgaagcagtgcccgccatatgcggaaactcatcgaggatcaccgccatggcgttagacgacaccatggatacgcagccgacaaaggccgctacgccgatcaccagtgaccagaagccgacatccagcagcgcgcagaccaccatccacaccgccatggcaaactggatccacagcccggcgcggaacatacgcaacgcccctacccgccgcacaaaccggctgttgaacatggtcatcagaaacagaaaaacgatgttcagcgcaaaatagtagccaaagtgctgaggcgcaacgtggtttatattgatgtagacaaagggaccggcgctaaggaaagagaacatgcccgcgaagctaaagccgctcgccagcatatagctcagtacccgcttgtggcggaacagcgtggcaaagttacccagcgtggtgcgcagatggaacggctgacgcctttcagccggcagcgtttcgcggataaacaggccgatcatcagcgaggccagcagggccaccagggcgaggatccaaaagatggcatgccagctgaaccagaccaacaccgccccgccgaccatcggcgccaccagcggcgcaatggtcgtgaccagcatgacaaacgacatcatgcgcgaaaactcatctttcggatagatgtcgcgcatcagggcgttaatcaccacgctggccgccgcggctgccagaccgtggaagaaacgcatgacaatcagcatatcgacggtttgcgacagggcgcaggctaccgccgccgccgcgaagaccagcgtcccgccgaggatcaccggcttgcggccaaggctgtccgccatcgggccgtacagcagctgacccagcgcaaagccgaggatataggtgctgagcgtcatctgcgcgctgccgtccgggacgttatactgggcggcgatcaccggcagggccggaagatacatatcaatagacagcggcatcagcatggccagcaggccaaggataaacacaatccccagtgaagaattctgcttcagcgtcacgttttactccgtggctgcggggcgcccacgctggcgatttccgcttccgtcagcggacgatattcacccggcgccagcgattcatccagcaggatgtcgccgatgcgttcccgatgcaggccaaccacgtggttgcccacggcggcgaacatgcgtttcacctgatggtagcggccttcgctgatggtgaggcgcacttcggtcggagtgataacttccagcaacgccggtttggtgagatctttttcgttatgcagctggacgcctttggcgaacagctcagcggtcccttccgccagcgggctttccagcgccaccagataggttttttcacaatggtggcgcggcgaggtaatgcgatgcgaccactggccgtcatcggtcatcagcaccagcccggtggtgtcgatatccagccgtccggcggcgtgcagcttatgcgccaccggctcgtcgaggaaataaaggatagtcggatgatcgggatcgtcggtggaacagacgtacccttgcggcttgttgagcataaaataacgcgggccattctgctgggtcagcgtatttccgtcatactccacctcgtgctccggctggagcttaaaagaggcatctttcacaatgtcgccgtccacggtaacgcggctgccgcgaatttcacgcccggcaatagcccggctgacgcccagctgctgagcgataaacttatcaagtcgcatgagatttttttagcctgtcatagtgctggagcgggcaaatcgcccgaaaaagaagaatttcaccggctagtataacgggctcttaacaccactcaagggaaaagattcatggcatactattcgccagttaattagccccgtgaattcatgacttttacattacgtccttaccaacaagaagccgtcgatgccaccctcgcctggttccgtcgccataccgagccggcggcgattgtcctgcccaccggcgcgggcaaaagtctggtgatcgccgagcttgccaggctggcgcgcggccgcgtgctggtgctggcccatgtcaaagagctggtggcgcagaaccatgccaaatactgcgcccttggcctcgaggcggatatcttcgccgccggtctgcagcgaaaagagagccacggcaaagtggtgttcggcagcgtgcagtcggtggcacgcaatctcgaccagtttcgcagcgaattttcgctactcatcgtcgatgaatgccaccgcatcagcgatgatgacgacagccagtatcagcagatcatcggtcacctgcggcaggtcaatccgcagatccggctgctcggcctgacggccacgccgttccgccttggcaagggctggatctatcagttccattatcatgggatggtgcgcggcgatgaaaaggccctgttccgcgactgcatctatgagctaccgctgcgctatatgattaaacacggctatctgacgccgccggagcgcctcgatatgccggtggtgcagtacgatttcagtcgcctgcaggcgcaaagcaacggcctgttcagcgaagccgatcttaaccatgagctgaaaaaacaacagcgtatcacgccgcatattgtcagccagatcgtggagttcgccgaaaaccgcaaaggggtgatgatctttgccgccaccgtggaacacgcccgggaagtgaccggcctgctgccggtaggccaggcggcgctgatcaccggcgaaacgcctgggccggagcgggatcgcatcatcgaggcctttaaagcgcaggcgtatcgctatctggtgaacgtcgcggtgctgaccaccggcttcgacgccccgcacgtcgacctgatcgccatcctccgccccaccgagtcggtgagtctttaccaacagatcgttggccgcggtctgcgcctggcgccggggaaaaccgactgtctgatcctcgactacgccggcaatccgcatgacctgtatgccccggaagtggggacgccgaagggcaaaagcgacaacgtgccggtgcaggtcttctgcccggcctgcggcttcgccaataccttctggggcaaaaccaccgccgacggcaccttgattgaacactttggccgccgctgccaggggtggttcgaagatgacgacggccaccgcgaacagtgcgacttccgctttcgctttaaaaactgcccgcagtgtaatgcggaaaacgacatcgccgcccgccgctgccgggagtgcgacactatactggttgacccggacgatatgctgaaggcggcgctgaagctgaaggacgcgctggtgctgcgctgcagcggcatggtcctgcagcacggcggcgacgagaagggcccgtggctgaaaatcacctactacgatgaagacggggcggatgtcagtgagcgcttccgtctgcagacccccgcccagcgcaccgccttcgaacaactgtttattcgcccgcatacccgcacccccggggtgccgctgcgctggataacgccggcggatatcgtgacccagcaggcgctgctgcgccatccggactttgtcgtcgcccgcatgaaggggcagtactggcaggtgcgggaaaaagtgttcgattatcaggggcgttttcgtcgcgccaacgagctgcgttaattaccggaaagctgaggttttgattgcccgggtgtcgtttggcggctataatgccgcccgcttttgcattcgcaaagcagataatccgcctgttgctgggtcgcctgtagcaggctttatatatagagagacatcaatgtttactatcaacgcagaagtacgtaaagagcagggtaagggtgcgagccgccgcctgcgcgcagctaacaagttcccggcaatcatctacggtggcgcagctgctccggttgctatcgaactggaccacgacaaagtatggaacatgcaggacaaagctgagttttacagcgaagttctgaccgtcgttgttgatggcaaagaagaaaaagtcaaagttcaggctgttcagcgccacgcgttcaagccgaaactgactcacatcgacttcgttcgcgcgtaatcgccgatagcaagttgtatggcaagcgccccggggtctcaggctccggggcgttttgttatctgcgcagccaaagctccggcgcctcgtgcacgatgtcgctaagcatccgatgcttattcattccgggcagccagagcatcaccatagtgacgttcagcccctgactgccgacctccgtcgcgatttcactgactccctgccactcgcctggccgcaaatggtccggtaaaaacccccagcccctcccctgctccagcgcatggcgcaacagggtaatttcattcatatacagcgtatggccggaaatctgcagccggcgggcgatttgatcgtcactgcgccggtgcatcactaactgcggcgtcaacgaaagattcaatagcgtcagcggccgcggagcgtcgtggaacaggctgtccgccgcgtagaaacgcagatccacggtgccgagcgcccgccactccatttcgctccccagcgtgcggttgttagcctgacaaatcgccatctccgccacgccatcgctcagcgcctgctcggcttcgcgacgcgaggcgctccagcagctcaggcggatctgccgtcgggccaggttatcggccagcgcacagagaaattcacgcggcacgaagggatcgtacaccagacgcagcgcctgcccggcggtttgcggcagcgtttgcgcaaaagactcgaaagcctgcgcctgacgcaacagcagatgcgcctggcgaaacagctgctcgccctcggcggttagcgtcaggctacgtccttcacggctgaacagccggtagcccagcgcatcttccagatagtccagcagatcgcgcagcgtggtccggtctttagctaaacgaatggccgcctgcgacaggctgccggtctcagcaatcgtcgcgaaggcttcaatctgtgcgaatgagtactgtagggttttcatcctttttctcccttaagggggaaaatcccccatgtgctgattttagccggcgcgcgccgatttatatactgcgcagcgaatctatggcaaacgaggaaatgacaatgataagaaaaccactggccctggcgttaatattggcggctctgccggcggcggcaatggcgcaacactgcggcagcctgacgctggatgtctgcccaacgccttacgatcaaacgctacccgcggccaaagacatgctcagctgggatcagacttcacgcgtgattggctttcgcaatgactatcgcaactatgccggcgatgtcttccgccacggcgcctcgacgccgctggagcgcgctgaaaaacaactgaccgatgcccgctatacgctcaacggccacacctggaatttgcaggattacctgaagcgcgagaacgtcagcggtatgctggtgctgaaagatggtaaagtcgcctggaaatatctcgccgaaggtaataccgacaccaccctgtggacctcgcgctcggtaggcaaatcggtggtctcgacgctggtcggtatcgccattcaacagggtaaaatccactcccttgatgacctgattaccgtttatgaacccgaactgaaaggcaccgcctgggacggcgtaacgctgaagcagttgattcaacacaccagcggggtggaatggaatgaagactacaccgacccgcagtcgcatttcgcccgcctgacccagtgtgaagcgcacccgggcgcctatgcctgcgtgcgtaaaatcgtcaccggcctggcgcgtcaacacccggcgggcgagcagtggtcctactcttccggcggcgcctggctgcttggggatatcctggagcgcgccaccggcatgtcgctggccgcctggcttgaacaggctctatggcagccggccgggatggcccacgacggcgtgtggcatgcttatcagcaagggaagcacgacgtcggcgcccacggctttaacgccacccttgaagactggggccgctttggtgaattcgtcgcccgtgacggtcggttaagcaatggcaaacagctggtgccgactggctggttcgatcaagccgccagctggaccaaggcgctaaactcggtctcggcagcgcatccggagggtatttacggctatcagtggtggaataacgcgattccggcgaatgcgcaaaacgtccagccgacgccgcaggaagggcttaaagggtcgctgtgggcgctggggatctacggccaggtgatcatggtgaaccgcgcggaacatctggtgatcgtccagtggtcgacctggccgcaggcggaaccttccttcaacgctcagccgttggaagcggcgctgatgtacagcgccattgcccgcgagctgcgttaactccccgctccttgccgctcagccggcgaggagcgtgtcggcattcagcgccaggtgttgcagcaggataatggttttagcatccatgatctcgccatcgcgaatggcctgcagcgcccgcgtcagcggccactccagtacttcaatgtcctcaccttccgccgccagtccgccgccgtcgccccgacggtcatcggcctgatattcggcgataaaaaagtagagtttttcggtgacggagccggggctcataaagacggtgaagacgggttcgacacgggtcacgcgaaagccggtctcctcttccgcttcggcaacgatccgcgcctccggcgaggcgttatccaacagcccggcggccgcctcaatgagatatccgtcgtggccatgagtaaataccggaaaacggaactgacgggtcaggaccaccgtccgcttttcccggttgtagagtaaaatgactgcgccgttgccccggtcataggcctcgcggctcagctcctgccagcgaccgtcccgacgcagcagttcgaaggtatattttttcaacgtgtaccagttatccgagagcagcgtctcgcgaacgtggcggacgtgcggtgcgtgtgtttgcatgttatttcccctttgaggtgacagcaggcaccataacatgcataatcgtgcacaaacaagatcattcgatgaaggaaaaccgatgctcgccagtcagagaaaacagcagatcctccagatcctcaccgaggaaaaacaggtgatgtccggggagctaagccagcggtttaacgtctccgaggactccattcgccgcgatctgcgcgagctggcggcggagggaaaactgcagcgggtccatggcggggcattgccggtatccgccgccattgcgccaattgaaacgcgcaaaagcgtgcagatcgcctccaagcaggcggtcgcccgcgccgccgccgccctgatccagccgggacaggtggtgattgtcgatggcggcaccaccaccgcggcgatgatcggctttttacccgccgacctcagctgcacggtggtcacccacagcccgggcatcgccgtggcgctggtggaccacccgcgaatcgaggtgatcctgctcggcggcagagtatttaaacattcggttgtcgccgtcggcgccgagacgctggcgggaatggcgcggatcaacgccgatctgttctttatgggggtgaccggcgtccacccgcgggcgggtttcaccaccggtgattacgaagaggcaggcatcaagcgcgcgctgacggccagggcggcagaaaccgtggtaatggcctcccgggaaaagctcaacgccgcgtcggcctttgccatcggcgagctgagcctcgccagtacgctgattgtcgatggagaacccgacgccgcgctgcgccaacagttggtgcagagcggcgtggagatcgtccccgttcagcggtagcgccgacggggcgcagggcttaattgccgcctgacgtccggcgctgcagctggtcgcgcaggttcggcggggtacccttaatggtcagggtatcagtggcgggatcccagaatacgcgttcgcccagcagcatggcgtcgaagttaatggtcaatccgccgccgctgccggcaaacttggtcagctgacgtaaggtgctgcgatccgccgggaagctctcttccagctcatagccctgctcagcggtgaattcctggaagctcttttcgctgacgccggcgagctctttggacagcgactccagctcaatctcttccccagcctgcagctgttcgttgcagtaggcgtagacctgctggcgcacgttctgtcgctcggatttatcaagctgggcatcggcggcgaagtcatccaccgcctgcagcaggccgcggttctgcgctttggcgttaagcccttcgctggcgccgaggaaatccataaagaaatcggccactttgcgccctacccgccctttcaggaaggtcagatagcgggtcgactccgggttggtttcccattcggtgagatcgatgcgcgcgacgatatcggcatggttaatatccagataatgggtcgagcggatatccagctcttcgttgacgcgcatactgctcaggttattgagtaccgccaccagcagatactcgaccgcaaggtaacgatactggcagaagaggacaatgcctccttcggcgaacgggtatttcgccagctcatcgcgcaggcgaccggtcgccgcgcggctaaacgccagaaactcttcttccccctgacgctgcaggcgcagcgcctgggccagttcgctctcttcattgaacaagccataggctttgcttttggcgctatagacccggtgcagttcagccatcatctcgacgaccgtcgcgttcggctccagcagtgactcgcgcagcaccagctccagattttgttcatcacgtttgattaactgatgcagggcaatctggtcgatatccagactcatgttaaactctccttttagaccgggcggtattcaaccaccgccgggtggccgacgcaactggcgccacacatttcgacgtcgttaacgtcgattgatgcgcttttgcgccgcggcgaaaaaatgcggaaaaaaagctgctgctacggtaatatgttgccctttcacgaacaaacagattttgagtttatgccgcaaatttcccgctatagcgatcaacaggtcgaacagttgctcagcgagctgacgaacgtcctggaatcacacaaagccccggtggacctttcactgatggtgttaggcaatatggtgaccaacctgatcaacagtagcgtcgcgccggcgcagcgtcaggccatcgcccgttctttcgcgcaggctttgcaatcttcgattaacgacgatccagcgcattaaggataacagcaacagtatatggtgactctacgtcagccctaccgagaaaaagtctcccagatggttagctgggggcactggttcgccctgttcaacatgttgttggccatggtgctcggcagccgctacctttttgtcgccgactggccgacgacgcttgccggacgactattttcgtacgtcagtctcgtcgggcatttcagctttctggtgtttaccagctatgtgctgatcctctttccgttgacctttatcgtggtctcgcagcgcctgatgcgcttcctgtcggtgatccttgccaccgccgggatgacgctgctgctgatagacagcgaggtttttacccgcttccatctgcacttaaacccggtcgtctgggagctggtcatcaaccctgaccagaatgagatggcgcgcgactggcagctgatgtttatcagcgtcccggtcatcttcttgattgaaatgctcttcgccacctggagctggcaaaagctgcgcagcctgacgcgccgccgccattacgcccgcccggtcgcctggttcttctttttgtcgttcgtcagcagccacctggtctatatctgggcggacgccaatttctatcgcccgatcactatgcagcgggcgaatctgccgctctcctatccgatgaccgcccgtcgtttccttgagaaacatggcctgctcgacgcccaggattatcagcgtcgtctggtggagcaaggggcgccggaggcggtatcggtccagtatccgcttagcaacctgcgctaccgtgacctcggcgcgggctacaacgtgctgctgatcaccgtcgacaacctgaactactcgcggtttgaaaagaccatgccggcgctggcggcatttgccaaagaaaacgttaactttacccagcatatgagctcgggcaataccgccgacagcggcctgtttggcttgttctacggtatttcgcctggctatatggacggtgtcctctcggcgcgtattcccgccgcgctgattactgccctcaaccagcaaggctaccagctgggcctcttctcctccgatgggtttagcagcccgctgtatcgccaggcgctgctctccgatttctcgctgccgagcgcgaagacccagagcgacgagcagacggccaatcagtggatcggctggctggaccgttacgcgcaggatgagaatcgctggttctcgtggatctcgctcaatggcaccaccctcgacgacacgcagcagcagggctttgtccgccgctacagcaaggcggctggcgacgttgatgcccagatcgatcgggtgctgactgcgctgcgcgaagccggcaaactcgataatacggtggtaattattaccggcggccacggcaagccgctgaatgcgaaacacgacgcgttcgactggtcgcgcgagcagctgcaggtgccgctggttattcactggccgggcacgccggcgcaggagattgccaccctgaccgataacaaagatgtgatgactacgctgatgcagcgcctgcttcacgtttcgacgccggccaatgagtactcgcagggagaagatctgttcagcgccgcgcggcgtcgtaactgggtcaccgcggccaacggcgatacgctggccatcaccaccccgaccatcaccgtggtcctcaaccataacggcacctataccacctggagccgcgacggcgagaaaattaaagatcagaaaccgcagctcagcctgttgctgcaggtcctgactgacgaaaaacgctttatcgctaactgattgattaattatgaatcaatcgcgcgtgacccgcttgcattcgcctggggaacgggtaatattgttccccacgcgtcggcacgtagcgcagcctggtagcgcaccgtcatggggtgtcgggggtcggaggttcaaatcctctcgtgccgaccaaaaactccacagaaaccagccttttaaggctggtttttttatgcctgtttcccctgttgccgcccgctcgcttaatttgtgccctttcttcaatgtatcgtgaagatgtacgactatcctgatggtaaattacgtcgtagcatctattattcgaccgtatgactcataagcaggagcggataacatgagagttaatggacttaccaagggatttttcatccttatcgtcttcattgtaaccctggccttttttgatgttctctcaccctattattccgccatcctttgggctgcgatcctcgcggtgatttttaatccggtcaaaaacaagatccgtacccgcctcggcgagcgcaatggcctcgcggcgctgatgaccatcgtcattatctgtcttatcgtttttacgccgctggctatcattctctcctcgctggcctacgagctcaacctggtgtacagcaaactgcagcataacgacacccagtttccgacggtggtcgccagcctgttcgcccatcttcccggctgggccagaagcttcctcgccgatcataaccttgatagcgcgcagcagatccagcagcagctctctgatgccgctctgaaaggcggtcagtatctggccggcagcgcgtttctgattggcaaagggacttttggcttcaccgtcagcttcggcatcatgctgtatctgctgtttttcctgctgaaggatggaccttatctggtgctgttgatcctcgagtctctaccgttatcaagctatgtgaagcagcatttgttcgctaaattcgccgctgtggcccgcgccacggtaaaaggtaccgtcgccgtggcgctggcgcagggggcgctgggtggctttgccttctggatcgccggtctggacggcagcattctctggggagcgctgatggcgtttctgtcgcttatcccggcggtgggctcggccattatctgggtgccagcggccatctacctcttcgccaccggccaactgtggcagggcgcctttatcgtcggcttctttgtgattgtgattggcctggtggataacattctgcgtccactgctggtgggcaaggataccaggatgccggactatctgatccttatcgccactctgggcggcatggagatctacggtatcaacggcttcgtgatcgggccgctgatcgccgccctgtttatcgcctgctggaacctgctgtcgggacgagaacatgccggcaataccgatgaaatcgatgaagagtttattgaggaagcgaaaaatagccgtaatgaatagctttcccggcagggggctggcggcccgccagcgcctctgttgcgctctgcgcggccgatgtcttaccagtagataacactattcattttgcaaaaattggtaaataaatcttaacattcagctgagtgatgataggctatctctgtcaggaacgaaaataaaggatgatcaaccgtgaaaaaaatcactacgctagccgtttctctgctgaccgccgcctgcatgtccgctggcgcattggccgcagaccagccgctggaaaaagtcgcgccgttcccgaaagcggaaaaaggcatgaagcgtcaggttattcagctgccgcagcagcaggatgagtcggcgctcaaggttgagctgatgatcggccagacgctggaagtcgactgcaaccatcatcgtctcggcggggaactggaaagtaaaaccctggaaggctggggctatgattactatgtctttgagaagctgagcggcccggtatccaccatgatggcctgcccggacggcaaaaaagagaagaaatttgtcactgccggcctcggggatgacgccatgctgcgctacaacagcaaactgccgatcgtggtatacacgccgagcaatgtcgatgtgaaatatcgcatctggcgcgccgacgagactatcggcaacgctgtcgtccgctaaggcgaacagcgcaaacggcaataaaaaacggcagcccgcaggctgccgtttttgtcagagcgtttatcagagcgcgatatccgccatcggcttgccgccgctcagcggcttcagctccgcctgcggtacctcatccaccgccccggctggctcatatttcagttccagcacttcactggtccacgccagcgctttctcgatctccgccgggttgccgtcaagacgaataccgtaggttgggatgatcgccttcagcttggtctgccattccggcgaattgactttatctttaaacactttttccattagctgcagcatgataggcgccgcggtggaggcccctggcgacgcgccgagaagcgccgcgacggtgccttcatcatcgctgaccacttcggtgcccaggcgcagtaccccgcccttcttcgcgtcgcgcttaatgatctgcacgcgctgaccggcctgccacaaccgccagtcctctttccgcgcttccggataatattcgcacagcgcggccagacgatctttatctttctgcatcacctggctaatcagatattttaccagatcgaagttgtccaggccgacgttgagcattggcaaaatatttgaggtattcgtcgaggccagcagatcccacagcgaaccgttcttcaggaaacgggtcgagaaggtggcgaatggtccgaacagcaccacgcgtttaccgtcgataatacgggtatcgatgtgcggcaccgacatcggcggcgcgcccacttcggcctgaccgtagaccttcgccagatggtggttcaccacctccggattttcgcagaccaggaactggccgccgaccgggaagcccgcatactctttggcctgcggaatgccggtctcctgcagcagggtcagcgctgcgccgccggcgccgataaagataaatttggctttaatgacccgcttctgacgacgattgtcggcatccgccagggtgaccgtccagctcttgtcggcgttgcgcttgaagcgacgcaccacggtgcccagctgtagggagaaattatcatgcttttgcagaccggcgatcagctggcgggtaatttcaccatagttgacgtcggttcccacttctgagcgagtggcggcgaccttttgcagcgggtcgcggccttccatcaccagcggcgcccaggctttgatctgctgatggtcttcagaatagcgaataccgcggaacagttcactttgctgcagcgccgcgtagcgcgcacggaggaagttgacgttatcttcgccccacacaaagctcatgtgcggcacgctgttaatgaaagattttggtttgttcaggacgccgcgcgtcacctgatgcgcccagaactgacgcgagatatggaaggcttcgttgatgtcgaccgctttgtcgatattgatgccgttggcggtctgcggcgtgtagttcagctccatcagcgccgcgtggccggtacccgcattattccacccgtttgagctctcttccgccacgctggacatctgctcaaccatggtaatagaccagtctggctcaagctcctgcagccaggttcccagtgtggcgctcataatgccgccgccaatcaacaatacatccgtctcttgctcatggcgggtgttggtccgagtgctgttgggaccaaccgcctgtgagcgtggtacggccatctttttattcatcggatttgagccttactttactcgctgtttttatttagcgcaggtgatacgattctcacccctcacgttaccaccgaagctcaaaaatttaaatattgtttaaattttaagttctgttttgagatccgttataaaaatgtttaataaatgtatacaccaaatcactttttgtactggtgcgctgacagattccgcgctatcatccctggttttgtgacagaccgcacggaagcagggcctgacaccgctccctctttttttataagctgcgaactttttttatgcccccagtttctgaccccgccgcttccggcaacctgcgtctcatcctccgctccccgtctttactgacgcgcgaagtgctggccggcgtgctcaccgccctggcgctcatccctgaagtgatttcgttttcagtcattgccggcgttgacccgcaggtaagcctgattgcttcggtggtgctctgcctggcgatgtcagtcttcggcggacgcccggcgatggtcaccgccgccgcgggctcggtggcgctggtgattggcccgatggtgcatcagcacggcgtggggtacattttaccggctgtcattctggcgggtattattcaaattttgtttggtctgtgcggcatggcgcgcctgatgcgctttattcccccggcggtgatgaccgggttcgtcaacgccctcgggatcctgattttctttgctcaggtgccgcatttctggagtcgacaaccgttaatcgttggcctgttcgtcctgacgctgcttatcgtcctgtgggcgccgcgcgttattaaggctatcccggcgccgctgatcgccatcgtcgcgctcaccctctataccgcgaccaccggccagcagctgccgaccgtcggcgatgaagggtcaatgagcggcggcctgccggggttcaccgccctgaccgttcccctgaacctgaccaccctgcagataatctggccgtgcgccctcagcatcgcctttgtcggcctgatggagtccttgctgacggctaagctggtggatgatctcactcataccccgtcgaacaaatcgcgggaaagcgccgggctgggtatcgccaatatccttgccggctgctatggcggtatcgccggctgcgcgatgatcggccagactatcgtgaacgtggaaatgggccgggcccgcagccgcctctcaacggtaatcgccggcctggtgctgctcctgctggtgacagcgctcagccaggtgatggcgaagatcccgatggcggttctggccggggtgatggtgatcgtggcggtgaaaacctttagctggcacagcattcgcccgggcgagctggcgcgtaatccgtggccggaaacgctggtgatgctggtgaccgtcgccgcgacggtgggaaccagcaatctggcgatcggtgtgctggcggggattgtcgcgatggcgatcatcccccgccgcctgcgggcaaaagcgcaggctacattagaaacagcgtcgccagacccagaaaaataaagaagccgccggtgtcggtgatggcggtgatcattacgctggagccgaccgccgggtcgcgccccagcttcaccatgaccatcgggattatcacgcccatcatcgccgccatcagcaggttgagcatcatggccagcgtcatcaccccgccgagctgcggatcgtcatacagccaccaggtgatggctcccataatcccgccccacaccagaccgttaatcagggcgacccccatttcacgcaggatcaggaaggtaaagctgccgggctggatctgctgcagcgccatcgcccggacgatcatggtgatcgtctggttgccggtgttgccgccaatcccggcgacgatcggcatcagcgaggccagcgccaccagctgtgaaatggtgtgttcgaagccgtcgatgacccgggaagcaataaacgccgtacacagattgaccgccagccacgcccagcgggttttcaccgctttgctgaccggggcgaagacatcctcttcatcgctcaggccgcccatccgccgcagatcgttatcggtttcttcataaaccacatcgacgatctcatcgatggtcaggcgcccgatcagcttgccgtcggcatcaatgacggcggcgctgagcaagtcatcacgttcgaaggtgcgcgccaccttctccgcttcttcgtgcggctgaaaggtgaccggatcgccctccatcacctcccccacccgcttctgcgcatcattgagcagaatggtctgcagctccagctcgccgagcagcagcttgttacgggtggtaacgaacagcttatcggtgttttccggcattttaccgagacgccgcagatagcgctgcaccgccgccagggtggcctccggtcgcaccgtaatgacctcaaactccatgatcgacccgacgctgttgtcggcgtagcgcataatctggcgaatacgggcgcgcttctcggccggcagggtcgccagcagccgtccggtcaggttgcgcggcagatgctgcagcaggtaaacctgttcatcgatatccagcggctgcatggcctgcagcagctcggggtcgctcatcttgtcgatcaggtcgccccagacgttctctgaggcctccagcagcacttcgccgcgtttatcgtcgggcaccaggcaccatagcgcggtgcgggcgtcatagggaagcgcttccagcgcatcggcgagatccggcggcggcagatgcgagaccagcatttccacttcggccaggtcatcggccagcgtcccttcatcatatcgttcagccagcgtcagtttgcccagcagcgcggaagtcaccgctttatcggtgctcaagagccaaatcagacgggcgcgctcttcgtcacgcaagcgggcgctttttttatgcaaaacggacatcgatcgggcaatccttttgagaatggtgagccggcctgcgggccggaagccttaagcatagcgcgaggagggggaaataataaccgtcagcgatgtagacgctgaaaatttcagcggcgcccgggcttttccgggcgcgcgttgtgaatcaggccgtacgggccaccgcatcgcgggaagcctgttcccgctcttcgccggtaagttcggcgagctggccggcgcgcatctccagcagacgatcggcgtgctggaagtagtgatcgtcatggctgatggcgaacacggttttgcccatctgctgcatcagcggcagcagaacctggtagaactcgcggcggaaatgcggatcctgatccgccgcccattcatccagcagaatgatgtcccgggactcggccagcgccagcaggagcgccacgcgcttcttctgccctttcgacagccgcaggtcggcgatttttccgttctccagctgcagcttgtgggccatttgcagacgctccagccatgtcgccaccagcgccggatcggcctcctcgccctgcggcccgagcaggcggtcaaacagccagacgtcggtaaacactgcggaaaacagtttgcggtactcctctggcctctccgccgccagcggctggccgtcgacgaggatctgaccggatattggctggtacaggccggtcaggagcatcgccagcgttgacttgccgctgccgttgccgcctatcagaaacaccagctcgccgcgcttcagcgtcagattaagcggccctaccgcaaagcgctggtccggataatagaaggtgacatcgcgcagctccagcgtctgccagtcaggatgcgcctgcggccggggaaagtcggcccggtacggggcgagggagaactgacgcagcttgttaaacgccacctgggcgctgagcagcgtgggcagcgcgccgacggcggagagcagcggcgtgcgcagaaacagcagcgtcagggaataggtcgccgccacggcggtatcggcccagccgaggctgttggccatccagaacaccagcccgatggcgccaagcatcataatattcgaccagttgaccgcgctgaggtggaaggtatcggcgcgaacgatatggtgccggtactcccgggcgtccgggaggtagagctggttaaacacatactccgcgcgctcgcggttgagggtcagctctttacgcccctccagcaccgtctgatagtcgtgatacagtttatcttccgtttcgcgcaggctggccatatgtttgtacacccgcgagaccagcacaaagccgccccagatggtgagcgccatccacagcgccgtcaccagcatcatttttcctgacagccaggcgaggtaggccgcggagccgaacgtgagaatgatcccctgcaccagctccggcaggcgcacaaaggcgatggtgatattgcggatatcgctggtcagcccggcaagcagcgacgcgctgccgatcttctctacttgttcaatctgggtatcgaggatgcgtttaacaaactcaccgcgcagacgatagacaaaatggtggccgagggtggttagcgccagctgcgaacccagggtcaccgccatcagcagccccagcagaccaagaaactccggcaggacccgcagcgaggtatcgacagcggtaatcagacgcaggttaatgaaagcgattaagccgatacccagcgcggcgctgagcaggctgagagcaataacgcccagaaacggccagcggtactggcgccagacgagagagagaagttccataacaggctatccgcaaaagcaaaacagccagcagtttaaacggctcgccgatgacatcaagaataattcttattttaatactggcgaccgcccgcctgtcggaaggtgagattgtaacgacaatcgcccgtttccggatgatgccccgctttcagcggctgaatgccatgataaaacaggcgcgactcgccgccccagaccaccacatcgccatgctccagcagcagccgctgcagcgggtcgctgcgttgcaagccgccaaactgaaagatggccggcaagcccagcgagaccgagacaatcggcgcccgcagatcctgttcatctttatcctgatgcaacgacagttttgcgccaggacaatagcggttaatcaaacaggcgtcgggagaaaactccggatagccgccggcggcggccgccgccagcgccagttcatgaaatacggcaggcatcggcggccaggtttgatcggttaccgggtcgaccggggcgtacaaatagccgtggcgatcggtagtccagcccagcgcgccgcagttggtcatggcgaccgacatggtgtacccgcccggcgtgaccatctggcgaaacggcgactgactggcgacgtcggctatcgcctgcagcagcgccggggcgcgttcgcgggcaaatcgccgcagcaccaccgcgccgggggccagcggctcctgccacggtggggtatcgctaaacagatcgagcattactcctcctcatgttgggcctcgcgcgccagcagctgcgcttttcgcgccgttccccagcgataaccggacagggcgccatcttcacgcaccacccggtggcagggaacaatcaccgccagcgaattcgccgcgcaggcgccggccacggctcttaccgcccgcggctggccaatatgctctgccacctggcggtagctgcgggtctcacccgccgggatctgccgcagcgcctgccagacctgcagctgaaacgcggtgccctgcagatccagcggcagcgataccggccgccggctgtcgtcgaggtgggcgaaaatctcggccatctgctgacaaaaatcagggtcgccttcacgcagctcggcattgggaaagcgccggcgcaggtcgtcgagcaatgccgcatcgttatcacccggcagcaccgcgcagacgccgcgctcgctctgcgccaccaggcaacgacccagcgcgcagtcgcccgtggtccaggttaccacggtggcggcgccgccgcggcgaaactggctggcggtcatccctaacgctgcgtcggcctggcgataatagctgctgctgtcgggaaaacctgccgccagcgcggcgcgggtcaccggtatcccctgctccagcgcttcccgcaggcgctgcgcccgccacgcttgttgccaggctttaggggtcatgccggtgacggatttaaataaacggtggaaatgaaacgggctcatcgccagctggcctgccagcgcctcgagggtcaggggcgcgtcctgctccagcagccgacaggcctgcgccactttgtcgaccctttgctgctgcgggtagtctttatccggttggcagcgtttgcaggggcggaatcccgccgccacggcggcggcgacgtcggcaaaaaagcgtacgttttctcgccgcgcgcgccgcgagcggcaggagggacgacagcagatgccggtggtcagtaccgcaaagacgaactgaccatcggcccgggtatcacgttcgcagaccgcctgccagcggcgatcatcggtatcggcaactatcggtttcatgacgggtctccagctgtaagtgtaccctcagtctgtggtaaagcccgcagtaaaaaacccgcaatcttgctttttaatttttctcgccgacaaggaaagtgcggaactgcggcgacatccaggttttaaaaccctctccttctttaacgatcatgtagaccgccagcccctcctcgcgcaccacctgctgcgctttttccggccccagcaccatcagtccggtatcccagccgtccgcctccagcgccgttggcgcaatgacggtcacggagaccagcttatgggttatcggctgcccggtctgcggatcgataacgtgcgagatgcgtttgccatcgagttcatagtagttgcgatagctgccggaggtgctgatgccgtgaccattgatgtcgacaatcgcctgaacggcgttttcgcggtcggtcggtttctggatcgctacccgccagggcttgccttcgccgttcatcccgcggctgaccagcgctccgcccaccgacaccagatagcgggagatcccctcctgctccatcaaccgcgcgaggtggtcggcggcatagccttcccccacggtggagaggtcgacaaacagatcgggaatatctttttgcaggaactgcctgccgctctgattaataacctgcagatgctgcaggccggtgcgcgccttcgccgcggctatcgcctcggcatccggggtggtgaccggctgtttatccgggccaaagccccacaggttgaccagcggccccacggtaatatccatcgcgccgtgcgttttggcgccaatccgcagcgacagggtgacgatatccgccatcgcttcgctcaccggccatggttcggtagtggcggcatgattgaagcgcatcagcgcggagtcgtttttccaggtcgacagcaggcgatcgtcggcgtccagctgggcctgaaccttggcgcgcaacgcctgggcctttgcctcatccacgccaatgacgctgacccgccagaaggtgcccatcgttttgccatccagcacggtggccgtcgcggtgggggtcgcaggagtggtagctgaatcgcagccagagagcagaacgcaggcgcccagcagcgcggcgcgaaagaaagtcatatccattaatcgaggctcctcttaccagggcgacaagagtataccagcgaggttaaaccggacataaaaaaaggcgccagaggcgcctttttgttatgcagcttgcaacttagaactggtaaaccaggcccagtgcaaccacgtcgtcggtagagataccagcgcgacgagtgaaatcgttttcgtccagcaggttgattttgtagtcaacataggtggacatgtttttgttgaagtagtaggtcgcgccaacgtcaacatatttcagcaggtcctggtcgccgtaaccttcgatgtccttacctttagactgcaggtaagccacggacggacgcagaccgaagtcgaactggtactgagcaaccacttcgaagttctgtgctttgttagcaaaaccgctaatagaatcagattctccgttgccgctgaaacgagttgcgttgtaggtctgggtgtactgagtcgccaggtaaatgttgttggcgtcgtatttcagaccaccggtgtaggtttcagcgttgtcgccacggcctttatccaaacgattctgatcgccgttacgtttggagtgcgagtacgcgaaaccagcgctgatgccatcatagatgtcataggtcagagaggtaccgaagccgtcaccgttctgtttcagagcgccacgaccgttgttggtcggagaagtaccttcgccgctgacgctgccgtttttaccctgatactgcagagcaaagttcaggccgtcaaccagaccgaagaaatcagagttacggtaggttgcaacgccgttagcacgggactgcaggaagttgtcagaaccgtaggtgtcgccgccgaattccggcagaacgtcggtccaggacgttacgtcgtatactacgccgtagttacgaccgtagtcgaaagagcccgcgtcgccaaatttcaggcctgcgaatgccagacgagtccatgcctgatcgctggagctttcagtgttgttcgcctgaacgttgtattcccactggccgtaaccggtcagctggtcgttgatctgggtttcgcctttcacgcctacacgcatgtaggtctggtcgccgtcgacgctcttgtcgtcagagaagtagtgcagaccgtcaattttaccgtacaggtctaatttgttgccgtctttgttataaatttcagccgcatttgctgcgcctgctaccagcagagccggtaccaggagggacagtactttaactttcatgttattaaccctctgtttgttatatgccttttattatgccactgcttactgattacccttctaatcagtcggctatttcattgtgctgcaaaatgcagaataatccaacaagaatatgatactaaaacttctaagatgtttcaaagttcccacaagatgtttcaatttgtaaattcagcggaacttttttcaccgcaaaatggtcagggaaatacgcactaatcatcaaaaaaaatatttaaccttttataatcaaagcgatagacaacaacatatctatagcactgaatggtaaaacaaaatgatcattggtggctaaaataagagtcgctatcatcattaactttatttattaccgtcattcagttctgaatgtctgtttacccctatttcaaccggatgcctcgcatccggttttttttacccttctttacacaactttaatttatctgtgctacggctaatgattccctaacgactattaatcaatcaattaggccatcagtggggcatattctgccaatgtcttgttatttcgtgcgattcttcccttttgtttccgtcaatatcgtcgccggttaaccttcccggcgcggtttcatttacgcttcgtttctaagataattcctgggcggcatcgcaccgcaggcgccaatctgtagtatggatttacgccattagcctttatactgccagcagcatctgctttgttgccagttactctggcgctacatcctgtttacaaacaatgatgagtcgttcagccacaagatgaccccgaaaaaattctccctgatccccggcaacatcagccgcttcttcattttgatggttattgtcctgctggcgacaatgggggtgatgatccaaagcgccgtcaatgcctggctgaaggagaaaagctatcaggtggttgatgtctcccacgctctgcaccagcgcattgacgcctggcgctatgccacctggcagatctacgacaatatcgccgccacctcagtcaacaccgcaagcggcggtctgcaggagacgcgtttaaaacaggacgtttactacctggagaaaccccggcgtaaaaccgaagccctgatctttggctcccatgacagctccaccctcgaaatgacgcagaaaatgtccgattatctcgatattttgtggggcgcggagaccattccgtggtcgatgtactatctcaacggcctggacaatagtctgatcctggtctccaccctgccgttgaaggacctctcttcgagcttcaaagagtcaacgatcagcagcgtcgtggagtcgcggcgcgcggaaatgctgctgcaggctaatacccttgatgagcgcgagacgttctcgccgttgcgccatctcgcctggcagaacgcgcactattttacgttacgcaccaccttcaaccagcccggacaccttgccacggtggtcgccttcgacctgccgattaacgatctgatcccgccgggcatgaccatcgacagcttccgtatcgagcctgacccgtcgcaaaatctcgccaccacgccggataaagagagcgccgatcatatcgggatcacctttaacggcatgcagattgacatcgccaccgatatcagcaccaccggtatgcagttgctgtggacggtaccaatgagcaccatgctgctggagtccatgcagaacattcttctgccgctgctgctcaacattggtctgctggcgctggcgctgtttggttttaccacctttcgccactataaaggacgcagccattcgtctggcgccgggctcccctccgccgccaacagcgaactgcgtctgctgcgcgccattaacgaagagattgtttctctgctgccgctggggctgctcgttcacgatcaggaagccaaccgaacggttatcagcaatccaattgccgaccatctgcttccgcacctgaatctgcagaacatcaccaatatggcggaccagcatcagggggtaattcaggccaccgtcaataatgagcagtatgaaatccgccagtatcgcagccaggtagcgccgcgcacccagatcctgatcatccgtgatcaggaccgcgaagtgctggtcaataaaaagctcaagcaggcccagcgcttgtatgagaaaaaccagcagggacgggccgcctttatgcagcacatcggcagcgccctgaagcagcccgcgctgacgctggcggcagaggcagcggcgctcagtagtacagagaaccggacgctggcccagcatgccgatgagctggtcaaactcatcgatgacattcagctcgccaatctgctggaaagcgatgcctggaaaaccaaccagacgttgttctcggtgcaggagcttattgacgacgtcgtgccggaagtgctgccggcgatgaaacgcaagggtctgcagctgctcatcaacaatgcgctcccggccggcgagcagcgctatggcgaccgtgaagctctgcggcgcacgctggtgctgttaatccagtattcagtgaccaccacgcctatcggcaagatcaccctcgacgtctgtcaggatgagtcggccagcgatcgcctgaccttccgcattctggataccggcaacggcgtctcggcaaacgagatcgacaatatgcacttcccgtatctcaacgagacccagagcgacctgtacggcaaagcaaacgcccttaccttctggctatgcgaccgcatgacgcgcaagctgggcgggcaattgaccattaaagcccgggagtcgctggggacgcgctataccctgcatctgaaaatgccggccagcgaagaggcgccagaggcgggagagcatttgctggatgacgttatcgtcctgctggatgtgacttccagcgaagtgcggcggattgtcactcgccagctggagagctggggagcgtcctgcatcacaccggacgatcgggcgaccagtcaagcctttgatctttatttaacggataatccgtctaatcttactgcttcaggcttgcttttaagcgatgatgaggtcgggatacgcaagatcggcccgggccaactgcgggtcaactttaatattagcacggcgatgcaggaggctatcctgcagcttattgagcagcagctggcggaggaggcggttcagcccgtcacctcaggaaacgagagtaacgccgaactccatgccagcggctattacgcactgtttgccgatacggtaccggatgatgttcagagattgtatactgaaatcgaagcgggcgattttgctgctctggcgcaaaccgcccaccgcctcaaaggggcatttgctatgcttaatctgatacccggcaagcagttatgtgaaacgcttgagcatctgattcgcgaaaaggatgcgcaaggcatagaaaaatatatcagcgacattgacgcttacgtcaagagcttgctgtagaaggtagccttatacatgaacactatgaacgtaattattgccgatgaccatccgatcgtactgttcggtattcgtaagtcacttgagcaaattgagtgggtgaacgtcgttggcgagtttgaagactccacggcccttatcaacaatcttccgaagctggacgcccatgtgctgatcaccgatctgtccatgcccggtgacaaatacggcgacgggatcacgctgattaaatacatcaagcgccacttcccggatctgtcgatcattgttctgaccatgaacaacaatccggcgatcctcagcgcggtgctggatctggatatcgaagggatcgtcctcaagcagggggcgccgaccgacctgccaaaagcgctggccgcgctgcagaaagggaaaaaattcaccccggaaagcgtctctcgcctgctggaaaaaatcagcgccagcggctatggcgataaacgcctgtcgccgaaagagagcgaagtactgcgcctgttcgccgaaggtttcctggtaaccgagatcgccaaaaagcttaatcgcagcattaaaaccatcagcagccagaagaaatcggcgatgatgaagctgggcgtcgaaaacgacatcgccttgctgaactacctctcttccgtctcgctgagcgcgacggacaaagagtaatctcttcgccctctccgtctcgccccggcgagacggagctccccattattcccgccctttacgcacccgcgccgcatataccgtcagcgtttgcttcagtacgtcgagggtgaccggcttggacagacaactgtccatccccgattccagacagcgctgcttctcttccgccagggcattggccgttacgccaatcaccggcagcgtcaggccaagctgacgaatgcgctgcgtcaggcgatagccatccatattaggcatgttgacgtcgctgagcacgatatcgatgtgctgcttgctgaggacgttgagcgcgtcgatcccgtcgttcgcggtcacgcactggtagccgagcgaacccagctgatccgccagcaggcggcggttgatcgggtgatcgtcgaccacgaggatcatcatgtcgtcgttattgccggcctgcgcctccggggccatcagcgccgggctattttccgcactggcgagcgcaacatggaaaatacgccccagcagcggcagcagttcgtggggagtcgtcacgctgtgcagccattcgccggcggaccgctcctgcggaataccgatatgacggcgacagaagatgaccatggcccttccctgccatccgctcagcgcctcatcgtcagtgagtaagacatcctcggcgtccggcgtttcgccggcatggcggcggaccgtcaggccgtggtagctgagcagcgaggtgacgaacatcgccagcgaagtgttatgaatcgccagccagcaggtcttgccagcgaaaccgtctctgctcaccggtgaggtattctgcacgccatacagaggaatacggatggtaaagcggctacccatccccggctcggtttcgacagcaatatcgccatccatcatgctgatcagtttttcacagatcgccaggccaaggccggtgccctgaaaattgcgctgcacgccggtccccacctggaagaaaggatcgaagaggcgcaatacctctttcgccgggatcccctctccggtgtcgcgaacgctaatctgcagataatcccccgcgcactggacgtgcaggacaatacagccggtatcggtgaactttatcgcattgctgagcagatttgagatcacctgctgcaggcgcatcgggtcgccggacatttgttccggaacgtccggctcgataaagcagtacaggcccagctgcttgcgcaccaccaacggcagatagttagcggagatatggttcatgacttcgcgcggagagaactcccgcggctcgatcttcaactgctcggactcgattttcgagaaatcaagaatatcgctgatgattttcagcagcaggctggaggagttgttcatcgccgtcacaaggcgatcgacgcctttcggcaacgctttggtctgcagcagatcgaggttaccgatgatgccatacagcggggtacgcagctcatggctaacggtcgccaggaacatcgatttcgactggctggcctgctccgccgcctgggccatctcctgcagcgactcctccattttcacgcgggcggaaacgtccaccagcacgcaaatggcgacgttttcattgcgatagcgtgaatgaacaaagctaatctgcaggttggtatggttgctggtcagcacgtcgacaaaattgacctgctggccgcagatgatctgcgtcagccgctggcggtcctcgtgggtcagcatgttcaggtagttgtgcgccagttcattactgagaatattggtcccgtcggcagtgcgcagaatacagatccctaccggggcagaagccacaattttgcggttgaactgctcgtgctcttccaggcgctgggcgtcattctccgcggggataaaaatgcgccgctcatacatccgcgccagcgcgaacagcatcgcgccgctgaggatattaagaacgatagcattgatgatcagcatacggatccgctccagcacctgatctaccgagacggaatagacgatgctcagggaggacggcgagaggctttttttcagcaccagctcgcggaaacccgaactgtagccaaaccacatccgctcctgcatccacttcgcttcgctctggattttaccttccgcaccggccagcgaaatcagcggctgcccgttatcgtcaaagatcgtcacactcatcggcaggctgcccggcgtaaagaagctttccatgcggatggtctgctccacgcccagcatcgcctgcaggcgattggccatatagaccggcgtcagggcgtaaaaatagcccaccccggggcgaacgccctggcttatccagaacaggttgttgccgcgctcattttgcggcgcgttgcgatattgctctatgcgctgatgcaggactttcagcgcctgatcgcgctcaatcggcacgtcccgcaggccaaagttggccatgcagaggttatcgctgccgatgagaaagatgcggttaaggtcgtaggcggcagtaaaattatcccgccagtagcgcataaaccatgccagcgactgcagcgaattacgccaggtggcgctcatcgcgctgcagtcggaatcggggtacaggggttcaaagttgggcaccgccatatcgccgttttgcccttgcgctaccgcgtcccctgccgacaagcgattaccggcgacatacttcagctctttcattacatccgcggtacgctggatatagcgctgggcctgatcggcgttgagattaagctcctgatggatttcggcttcccgctcgtgcagcgcgttgacgatataaaacacagagacaaacgcaataagcagccacagcaataccgccagcgctctgaacagataacgtgaaaccttcagggttgtatgaaaagaggcaagatatttcaatgtggcgatgctcggccgtcagggactcaacagaatgcggttaaggtagcggtaaaccggctttgccgcaatgttaatgcaaaaagggccgggaaaatacccggcccttccagaacatttacctcggacgattattcttcgtcttcggcgatgtcgtcatcggtatccgcttccggggcgatatcgtcatcgccttctgccgcgctaccgtcgatggcatccagctcttcatcatccaccggctcagccacgcgctgcagacctaccacgttttcatcttccgcggtgcgaatgaggatcacgccctgggtgttacggcccacgatgctcacttcggaaacgcgggtacgcaccagcgtcccggcgtcggtgatcatcatgatctgatcgcagtcatccacctgcacggcgccgaccacggaaccgttacgctcggtgactttgatcgaaataacgccctgggtggcacgcgacttggtcggatactccgccgccgcggtacgtttaccgtaaccgttttgcgtcaccgtcaggatcgcgccttcgccgcgtggaataatcagcgagacgacgctgtcgttttccgcaagcttaataccgcgtacgccggtggcggtacggcccatggcgcgaacggcgtcttccttgaagcgtacaaccttaccggccgcggagaacagcatcacttcatcctgaccagaggtcagatcgacgccgatcagctcatcgccttcgttcaggttgaccgcgatgataccggcggaacgcggacggctgaactcggtcagcgcggttttcttcacggtaccgctggcggtcgccataaagacgttgacgccctcttcgtactcgcggaccggcaggatggcggtgatgcgctcatcggcttccagcggcagcaggttgacgatcggccgaccgcgcgcgccgcggctggcttccggcagctggtagaccttcatccagtacagacggccgcggcttgagaagcagaggatggtgtcatgggtgttagccaccagcaggcggtcgataaagtcttcttctttaatgcgcgctgccgatttgcctttaccgccacgacgctgtgcttcgtagtcggtcagcggctgatatttcacatacccctgatgcgacagggtgaccaccacatcttcctggttgatcagatcttcgatgttaatatcagcgctgttggcggtgatttcggtacgacgttcgtcgccgaactggtcgcggatcagctccagctcttcgcgaatcacttccatcagacggtcggcgctgccgagaatgtgcagcagctctgcgatctgctccagcagctctttatattcgtcgagcagtttttcatgctcaaggccggtcagtttctgcagacgcagatccagaatcgcctgagcctgctgctcggtcagatagtatttaccgtcgcgtacgccgaactctggctccagccattccggacgcgcggcgtcatccccggcgcgctccagcatcgccgcgacgttaccaagatcccacgcctgggcaaccagcgccgttttcgcttctgccggggtcggcgcgcgacggatcagttcgataatcgggtcgatgttggccagcgcaacggccagcgcttcgaggatatgcgcccggtcgcgcgctttgcgcaattcgaaaatcgtacgacgggtcaccacttcacggcggtggcgtacaaacgcggcgatgatgtccttcaggttcatgatcttcggctgaccatggtgcagagctaccatgttgatgccgaaggagacctgcagctgggtctgggaatagaggttgttaagcaccacttcccctaccgcatcgcgcttcacttcaatcacgatgcgcatcccgtctttatcagactcgtcacgcagcgcgctgatgccttccacgcgtttttctttgaccagctcggcgattttctcgatcaggcgcgctttgttcacctgatacggaatttcgtgcacgatgatggtttcgcggccggatttcgcgtccacttccacttccgcgcgcgcgcgaatgtacactttaccgcgaccggtgcgataggcctcttcgatgccgcgacggccattgataatggcggcggtcgggaaatcagggccaggaatatgcgccatcagcccttcaatgctgatgtcttcatcgtcaacatacgccagacagccgttaatcacttccgtcaggttatgcggcggtatgttggtggccatccctacggcgatcccggaggcgccgttcaccagcaggttaggaattttggtcggcatgacgtccggaatacgctccgtaccgtcatagttgtcgacgaaatcgaccgtctctttttcaagatcggccatcagctcatgagcgattttcgccagacgaatttcggtataacgcatcgccgcggcggagtcgccgtcgatggaaccaaagttaccctggccgtccaccagcatgtaacgcagcgagaacggctgcgccatacgcacgatggtgtcgtataccgcggagtcgccgtgcgggtggtatttaccgattacgtcaccaacgacacgggctgattttttataggctttgttccagtcattgcccaatacgttcatggcgtaaagtacgcgacggtgtaccggcttcaggccatctcggacatccggcagcgcacggccaacaatgaccgacatcgcataatccagataagagttcttaagctcttcctcaatgttgaccggtgtaatttctctcgcaaggtcgctcatctaaccgctatccctctactgtatcccggattcaaaggtcgcaaattataacacagccgcgctaatagaggtaaagcaatacggtttattcatggcgcgctgctgatatactcgcaggtctgaacagaaaaggagtaaaagcgcccatgaatgccgaaaaaacgtcggtagcccctaatgtcgatcatgctgaaatcgccaaattcgaagccgtcgcctcgcgctggtgggatctggagggcgagttcaaaccgctccaccgcatcaacccgctgcggctgggctatattgccgaacgctccggcggcctgttcggtaaaaaagtcctcgatgtcggctgcggcggcggcatcctcgccgagagcatggcgcgcgaaggcgcgacggtcaccgggctggacatgggggccgaaccgctgcaggtcgccaggctgcacgccctggagagcggtattcaggtagactatgttcaggaaacagttgaggaacatgccgcgaagcacccgcagcagtatgacgttgtgacctgcatggagatgctggagcacgtccccgacccgcagtcggtggtgcacgcctgcgcgcggttagtgaagcccggcggccaggtcttcttctccaccatcaaccgcaacggcaaggcctggctgatggcggtagtcggggcggaatatgtcatgaagatggtgcccaaaggcactcatgatgtgaagaagtttatcaagccggccgagctgctgggctgggtagatcagacaactctgaaagagcagcatatcatcggtctgcattacaatccgctgaccaataccttcaagttagcgccgggggttgatgttaactatatgttgcatacaaccgccaaacaggactgaggtcagcacctccgcttatgatgattgcgcggcatcaagccgcgtgattatttcttccgatgaagaaatcagcactcgatcaaattttcatttttttttctgttttattgacttcttctccaggccttatgcgacgtggacttgcggattattacccttccgcaacctcaatttaacgtcaaaatcaacccttgtactcaaaagattccttactaaaatactcaccatatagcgtttcttttatcgacaaccccctacatatagtatttatccacagagttagtcacaacggccttctgtggataaacgggggatattttctttcacggacaggtaaaatccacatgaatcagagtctgctggtgacaaagcgcgacgggaccaccgagcgcatcaatctcgacaaaatccatcgcgtactggattgggcggcagaaggactgaataacgtttcgatttcccaggtagagctgcgctcccatatccagttctatgacggcatcaaaaccgcggacatccacgaaaccattattaaagccgctgcggatctgatctcccgcgacgcaccggattaccagtacctcgccgcgcgtctggcgattttccatttgcgtaaaaaagccttcggtcagtttgagccgccggcgctctacgatcacgtggtgaagatggtcgagaaaggtaaatacgatcatcatctgctggaagactacacggaagaagagttccagcagatggacggtttcctcgaccactggcgcgacatgaacttctcctacgcagccgttaagcagctggaaggcaagtatctggtacaaaaccgcgtcaccggcgaaatttatgagagcgcgcagttcctctatattctggtcgccgcttgcctgttctcgaactatccgcgcgaaacgcgtctggactatatcaagcgtttctacgacgcggtgtccacctttaaaatctcgctgccgacgccgatcatgtccggcgtgcgtaccccaacccgtcagttcagctcctgcgtgctgatcgagtgcggcgacagcctggattccatcaacgccacctccagcgcgattgtgaaatacgtttcccagcgcgccggcatcggcatcaacgccgggcgcattcgcgcgctgggcagcccgatccgcggcggcgaagccttccacaccggctgcattccattctacaagcatttccagaccgcggtgaaatcctgctcgcagggcggcgtgcgcggcggcgcggcaaccctcttctacccaatgtggcatctggaagtggaaagcctgctggtgctgaaaaacaaccgtggtaccgacgccaaccgcgttcgtcacatggactacggggtacagatcaacaagctgatgtacacccgtctgctgaaaggcggcgatattaccctgttcagcccttccgacgtcccgggcctgtatgacgccttcttcgccgatcaggacgagtttgagcgcctgtacacccagtacgagcaggacgacaccattcgtaagcagcgtattaaagccgttgagctgttctcgctgatgatgcaggagcgcgcctctaccggccgcatctatatccagaacgtcgaccactgcaacacccacagcccgttcgatccggtagtcgccccggtgcgtcagtctaacctgtgcctggagattgctctgccgaccaaaccgctggaagatgtcaacgacgaaaacggcgaaatcgcgctgtgcaccctgtcggccttcaacctcggggctatcgacagcctcgacgagctggaagagctggcagtgctggcggtgcgtgctctggatgcgctgctcgactatcaggattaccccatcccggcggctaaacgcggtgcgatggggcgtcgtacgctgggtatcggcgtgatcaacttcgcttactatctggcgaagcatggcaaacgctactccgacggcagcgccaacaacctgacgcacaaaacgttcgaagcgattcagtactatctgctgaaggcctctaacgagctggctatcgagcaaggcgcctgcccgtggttcaacgaaaccacctatgcgcagggcatcctgccgatcgatacctataagaaagatctggacggcatcgtcagcgaacccctgcactacgactgggaagcattgcgcgagtccattaaaactcacggcctgcgcaactccacgctctccgcgctgatgccgtccgagacctcgtcgcagatctccaacgccaccaacggcattgagccgccgcgcggccacgtgagtatcaaagcgtccaaggacggtatcctgcgccaggtggtgccggattacgaaaacctgcagaacgcctacgagctgctgtgggagatgccgaacaacgacggttatctgcagctggtgggtatcatgcagaagtttatcgaccagtcgatctctgccaacactaactacgatccgacgcgcttcccgtccggaaaagtgccgatgcagcagttgctcaaagacctgctcaacgcctataaattcggcgtcaaaacgctgtactatcacaacacccgtgatggcgctgaagacgctcaggatgacctggccccgtccatccaggacgacggctgcgaaagcggcgcttgtaagatctaaggtacttttgccgggtaacgctacgcttacccggcctacgtttgtgtaggcccggccaacccattcccgccgggcaatacagttcaacaggactcacttcaatggcatacaccactttttcacagacgaaaaacgatcagctgctggaacctatgttttttggccagccggttaacgtggcccgctacgatcagcaaaaatacgacatctttgaaaagctgattgaaaagcagctctccttcttctggcgcccggaagaggttgacgtttcccgcgatcgcatcgactaccaggcgctgccggaacatgaaaaacatattttcatcagcaacctgaagtaccagacgctgctcgactccatccagggccgtagcccgaatgtggcgttgctgccgctgatctccatcccggagctggagacttgggtagaaacctgggccttctccgagaccattcactcgcgttcgtacactcacatcatccgcaacatcgtcaacgacccggcgaccgtgttcgacgacatcgtcaccaacgagcagatccagaaacgtgcggaaggcatctctcactattacgattcgctgatcgagatgaccagctactggcatctgctgggcgaaggcacccacaccgtcaacggcaaaaccgtgaccgtgaatctgcgcgagctgaaaaagaaactctatctgtgcctgatgagcgttaatgccctggaagcgatccgcttctacgtcagcttcgcctgctccttcgcctttgccgaacgcaaactgatggaaggcaacgccaaaattatccgcctgatcgcccgcgatgaagcgctgcacctgaccggcacccagcatatgctgaacctgctgcgctccggcagcgacgatccggaaatggcggaaatcgccgaagagtgcaaacaggagtgctatgacctgttcgtgctggcggcgcagcaggagaaagagtgggcggactacctgttccgcgacggctcgatgatcggcctgaataaagatattctctgccagtacgtcgagtacatcaccaatatccgcatgcaggcggtgggcctcgatctgccgttccagacccgctccaacccgatcccatggatcaacacctggctggtctccgacaacgttcaggtggcgccgcaggaagtggaagtcagttcttatctcgtcggccagatcgattctgaagtcgatgccgacgatctgagtaacttccagctgtaatgaagcggatcttcctgaaaatctctgacactcgccttgagtgtcaggatgaacacccttccctgctggcggcgctggagtcgcataatatcgacgtcgaatatcagtgccgcgaaggctactgcggctcctgccgcactcgcctggtctccggccaggttgactggctgaccgagccgctggcctttatccagccgggagaaattttgccctgctgctgccgggcgaaaggcgatattgagatcgagatgtagtcttgtcaggtggcgctacgcttacctgacctactgttccaggaccggccgtttacgcactgccgccctgggctgctgaaactgccggtgttgacggcctcaaaatcgctgagacgttcccggaaggccggggcagcccgcatggatgcgggctgagggccgtgttttgcatggacgctacctcggcccgacccgaagcctgcagggataagtcgaagggaccgcgcagcggcgattttgctggccggagcccgggggtacagggggaggcggcgactggcctccccctgtgcgctccctgcgctatgaaaggcataacgcagaagaaatatcgggagcgcaatcttccaggaaataacatagaacaaacgttattcccgggtcgaaatcgttgcacgccgagaacagtgtcaacaaaaccgcagttcgtacgccgggtaaggcgtagccgccatccggctttttactgtttcgcgtccaggaactgcaccgctttatccgggaaatcggtaaataagccgtcgacgcccgcctggttatacagcacgtcatagagctgattaacgttagtcgcgtactccggcaactgatccgcgcgcacggtgtacggatgcacctgcagatggctggcatgcgcctctttcaccatcgccgtcagcttcaccgcccccggcttcgagccttccgctaccagcatatggtaatccgggccgatgccgtccgcgtactgcgcaatctgcgccatcgcccctggcttgaacatccagtcatagctgtagttcacccacttaccatcggcctgtttctgctgggtttcattccagtcggtataggcgatgagctgcaccagattgagatccatccccatcttcggctccagctcatttttaatgcgtttgagctcgttggcgtcaaagcactgcagataaaccttatcgtgcttgctggtatagccatattccttcagcaccttcaatgtgctggcggcaatatctttgccttcctggtggtggaaccacggtgctttgatttccgggtagataccgatgtttttgccggttgaatggttcagcccctggacaaactcaatctcctcttcaaaggtatgaatacggaaatcggatttgcccatcgggaatcgcccgggataggtttgcacgttcttaccatttttcggctcaaaaccttcggtgaacttcagcgacttaatctcgtccagggtaaagtcgatggcgtagtaacggccatctttacgcgcccgctgcgggaaacgctgcgcaacgtcagtcacccgatcgagatagtggtcgtgtaacaccaccagccggtcgtctttggtcatcaccaggtcttgctcaaggtaatccgccccctgagcgtaagccatcgctttcgccggcagggtatgttccggcagatacccgctggcgccgcggtgggcgatgaccattttatcagccgctgtcgcgctgaagcacagcgccgaactggacagaatcattccgctcatcagcgcggtaagtttcattttcatcgccgctccttaggcttgtttcagctgttggtgatggcgacgttcaccgagcatcacgataaccagcaggataaccgccagcacgctgccgccgatcatcaccataaagccgccgtcccagccgaagaaatcgacggtgtagccgacgatagcgctcgcggccacggaaccgccaagatagccgaacaggccggtgaagcccgcggcggtcccggcggcttttttcggcgccagctcgagggcatgcagaccaatcagcatcaccgggccgtagatcaggaagccaatgatgatcatacaggccatatcgacgcccggattacccggcgggttcagccagtaaacgacagtggcgatggtcaccagggtcataaagaacacgccggtggcgccgcggttgcctttaaacactttgtccgacatccaaccgcacagcagcgtgcccgggatccccgcgtactcgtacaggaaataggcccaggaggatttatccagcgcgaagtgtttaacttctttcaggtaggtcggcgaccagtcgagaatgccgtagcgcagcagataaacgaagacgttagcgatagcgatgtaccacagcagcttgttcggcagaatgtactgcataaagatctgcttcgccgtcagctcttcttcgtgcttttcgctgtaatcgtccgggtagtcgtttttatattcttcaatcggcggcagaccgcaggactgcggggtgtcgcgcatcattgcgaaggcgaaaatcgccagcagaatggcgccgaatgccggcatatacagcgccgcgtgccagtcgttaaaccacgccatccctaacaggaacagcagcggcggaatgccgccgccgacgttatgcgcgcagttccacaccgagacaatcccgccgcgctctttctgcgaccaccagtgcaccatggtccggccgcacggcggccagcccatcccctggaaccagccgcagaggaacagcagcacgaacattatcatgatgctggacgtcgcccacggcacgaagcccatcaccagcatcaccagcgcggcgaggatcaagccagccggcaggaaaatgcgcggattcgagcggtcagagaccgatcccatgatgaatttcgaaaatccataggcgatggagataccggaaagggcgaagccgaggtcgccacgagagaacccctgctcgataagataaggcatcgccagggcaaagttcttacgaaccaaatagtaggcggcataaccaaaaaagatgccaataaaaatctgccagcgtaatcggcgatatagcgggtcaatctccgctgctggcaaacgcgctttatgcgcggcgggtttaaaaatacttaacatatcagcctccgtggcccttgctgttttctactgacgtcacgacaaaatcccagattaatcaccaacttcaaatatggtcgcgatggtaggcaatacgtagagttgatactgtgaaacatcgcacaatttgttacagaaatatgacaaaacgttccaatgtgagcacgaaatcacataacacgctcaaataacgcgcgaatatgctcgaaatcaaacaataaccttactaattgtggctaaatggcgtaaaacgaaagcagaggagctgaagatgacgggacgtcttgatagcgaggtcattatcatcggcggcggagcaaccggcgccggtatcgcccgcgactgcgcccggcgcggattacgaacgctgctcattgagcgccatgatatcgccaccggggcgaccggccggaatcatggactgctgcacagcggcgcccgctacgcggtgaccgacaacgaatccgcccgcgaatgcatcagtgagaaccgcatcctgcgccgcatcgcccgccactgtattgaaccgaccaatgggctgtttatcaccctgcctgaagatgacctggcatggcagcaaacctttatcgacgcctgtcagcaggctggcatagaggccacgccgctctcgccgcaggaagcgctgcgccgggagcccgccgtcaacccgacgctgctgggcgcggtgcaggtcccggacggtaccatcgacccgtttcgcctcaccgcggccaatatgctcgacgcccgcgaacacggcgcgcagatccttaccggctgcgaagtaacaggcctgctgcgccggggcgatcgcgtctgcggcgtccaggtatacgaccgccaacttcaccaggcccgcactctgtacgccgggatggtggttaacgccgctgggatctgggggcagcgtattgcggaatatgccgacctgcgcatcaccatgttcccggcgaagggatcgctgctgatcctcgatcatcggattaacaacctggtgatcaaccgctgccgtaagccggccgacgccgatattctggtgcccggcgataccatctcgctgatcggcactacctcaatgcatattccttatgacgaaattgacgacaaccgggtaacagcggcggaggtcgataccctgctgcgcgaaggggaaaagctggcgccggtcatgggccgcacccggatcctccgcgcctactccggcgtccgcccgctggtggccagcgataacgatcccagcgggcgcggcgtcagccgcggcatcgtcctgctcgaccatgcccagcgtgacggtatggaaggcttcattactatcaccggcggcaagctgatgacctatcgccttatggccgagtgggccaccgacgccgtctgtcgtaagctgggaaacaccaccccctgtaccacggccgaagccccgctgcccggttcacaggagccaacggaaagtaccctgcaaaagattatctccctccccaccccgctgcgcggctcggccgtctaccgtcacggcgatcgcaccccgtcctggcttggcgacagccgccagcaccgtagcctggtctgcgaatgtgaagccgtcactgccggtgaagtgaaatacgcggtggaaaacctggcggtcaacaccctgctcgacctgcgccgccgcacccggattggcatggggacctgtcagggggaactctgcgcctgccgcgctgccggcctgctacagcgctttaacgtcaccacgcccgcgcagtcgttaacccagctctcggaatttctcaatgaacgctggaagggcgtgcagcccatcgcctggggcgatgcgctgcgcgaaagcgaattcacccgctgggtctacctcggcctgtgcggattgccacaggagcaccgggatgaagtttgattgcgcgattatcggcggcgggctcgccggcctgctgtgcgggctggccctgaatcagcacggcctgcgcagcgtcatcatcagccgcgggcagagcgcgctgcatttttcctccgcgtcgttagacctgctctcggcgctgcccaacggcgatcacgtcactgacgtcgcacaaggtctgcagcaactcgctgaacagcttcctgaacacccttattcccggctcggcgccgaggcggtgctcgaatacgcgacacagaccgaagccctgctggccgcctgcggcgcggtgatgcagggcgatgcgcgccggccgcaccggcgggtaacgccgctggggacgttgcgcccggcatggctgtcgccccttgaggtgcctgtcgcgcccctgccgtcgcagggcgcctgtctggtggggatcagcggctttgctgattttcagccgcatctcgccgccgccgcgctcggtcaacacggagttaccgccgcggcggtggaaatcgagttaccgctgctggatgtgctgcgtgacaacccgaccgagtttcgcgccgccaatatcgcccgcgtcctggatgatgagaatatgtggccggccctgcatgcagcgctgctaccgctggcgcagcagtatgacctgctgatcatgcccgcctgttttggcctcgccgacgatcgcctttaccactggctgcaggcgcgtctaccctgcccgctgcgtctgctgccgacgctgccgccttcggttcccgggatgcgtttgcattctcagctgcaacgccagttcattcgcgagggcggcgcctggctcgcaggcgatgaggtggtgaaaatcagccatcgacaggacgccgtcgaggcggtctggacgcgcaatcacggcgatattgcgctgcgtccgcgctttaccgtgctggccagcggcagctttttcagcaacggtcttgtcgccactcgcgatagcgtgcgcgagccgatcctcggcctcgaccttcaccagaccctgccacgggaaagctggtaccagcgcgatttcttcgcctcacaaccgtggcagcgcttcggcgtgaaaaccgatgccctgctgcgccccctgctgggcgggcagccgttccataatctgttcgccatcggctcattgctcggcgggttcgatgccattcagctcggctgtggcggcggcgtctgcgccgttaccgcgctgcacgccgccagacagatccacgcccttgccggaggccggccatgaacgatacccgttttgaaagctgcattaagtgcacggtctgtaccaccacctgcccggtaagtcgggtcaatccgcgctatcccggcccgaaacaagcggggccggacggcgaacgcctgcgtctgaaggatggcgcgctgtacgacgaggcgctgaagtactgcattaactgcaagcgctgcgaggtcgcctgcccgtcggatgtgaaaattggcgatatcattcaacgcgcccgggcacagtacggccagcaaaagccgaccctgcgcgacgccatcctcagccataccgacctgatgggtaccctttccaccccctttgcccccctggtcaacgccgccaccggcttaaaaccggtgcgccgtctgctcgacgcgacgctcaacatcgatcaccggcgtacgctgccgaaatatggtttcggcaccttccgccgcgcttaccgccagctcgccgcccgtcagaagcagtacagcgaacaggtggctttctttcatggctgctacgtcaactataaccatccacagttgggtaaagatctgattcgcgtcgtcaacgcactgggtaccggggtgcagttgttatcaaaagaaaaatgctgcggcgtaccgctcatcgccaacggttttttcgacaaggcgcgtaagcaggcgcagagcaacgtcgccgcgatgcgggaaaacacgctaccgatcattgccacctcctcgacctgcgcctttacgctacgtgatgaatacccccatctcctcgatgtcgataacagcgatcttcgcgatcgggtcgagcttgccacccgctggatctggaaacagctggctgccggcaggacgctaccgctgcgcccgctgccgctgaaggtggtctatcacaccccgtgtcatatggaaaagatgggctggtcgctgtataccctcgagctgctgcggctgatccccggcctgcagctggaggtgctggattcccagtgctgcggcatcgcaggcacctacgggtttaaaactgagaattacgcggtatcccaggctatcggcgccccgctgttccgtcagattgaggagagcggggccgacctcgtcgtcaccgactgcgagacctgcaaatggcagattgagatgtccaccagcaaacgctgcgagcatccgctgacggtgctggcgcaggcgctcgtctgagcccagcgccagcctgtgccgtcaatagctcgttttctcttgcggctgggcgctggcagatttaaacatcgccagccggcggtccagcgcctgggtatacagcatggtatccaccccgacggcgacaaagttggccccccaggcaagacatttttccgccatcgccgggtcgaccgccagaaatccggccgctttccccgccgcgcgaatgcgccggatgctctgctcgatcacccgctgcacgtcagggtgaccggcatcgtccgggtagcccagcgaggcggagagatccgccggaccgatgaacaccccgtcaatgccgtccacctcgagaatagcgtccaggttctccagcgcggttcggctctcgacctgaatcagcagacagagttcgtcattcgcctccgccatataattctccacccttccccagcgcgccgctctcgccacgccggcgccaacgccgcggctcccgatggggggataacgggtcgctgagaccacctcccgagcctgctcggcggtatcgaccatcggcaccagcaaggttctggcgccaatatccagcacctgttttatcaggctgcggttgccctcgaccgggcgaatgaccggctggctggcatagggggcaatcgcctgcagctgatgataaagatcctgaatggtgttcggggcatgctcgccgtcgatcagcagccagtcgtatcccgacgtcgcagcgatctccgccatgtaggatgaggtggagctcagccacaggccgatttgcgtctcaccgcgtaataatccccgtttgaaggggttagataacagtgcgttcatagcgattcctttattcaatgctgtacgctgccgcgctggggtaccgcgcgggtaaggctcaatgaaaagataatgaccaccccgacaatggcgacgccggccagggttaacagtccggcggcgctgctggcgaacaacgtttcggcctgcacgcgcacgatcggcgccagaaaaccaccgatggcgccaaacaggttaacaaagccaatccctgcggccagcgccgtgccggacagcagctgcgtcggcatcgtccagaagaccggctgcacggcgatcaccccgaccgccgccacgcacagcgcgatgatagccagcaccggcgccaccagtccggacactgcaatcccgaccgccgccgccagcagcgtcagggcggcaatattgcgtcgctcgccggtgcgatcggagtagcgagggataagccaggtgccaaacagcgccgccacccacgggatggccgtcaccaccgaggcaacgaagccgactttggtgcccagcagcgcagcaacctgggtgggcaggaagaaaatcagaccatagaccgccacctgaatggtcagataaatcagcgccagctgccagacccgcccgttacgcagcgcatcggacaggcgcgaggcaatctttttctcctcctcgcgcgccagctcgcttatcagcgcctgtttctccgctgcgctcaggaagcgggcatgctgcggcgaatcgtccagccagaagaaggtgaacgctcccgcggcgacggcgagcaggccttcaatgacaaacatccagaaccagccgggatggcccataaatccatgcatctccagcagcgcaccggataaaggcgatcccagcgtcagggccagcggcgcgcccatataaaacagccccataatgctggcgcggttttgctggggaaaccactgtgaagtgaggtagatcattccgggaaagaagcccgcctccgccgcgcccagcagggtacgtaccagcaggaatttcgcttccgtatccgcccacgccatcgccgccgacagcactccccacagcagcgtggtgcagccgatccatcgcctggcgccaaatttgcgcatcagcagattggccggcaccccgaggaaggcatagaccacaaagaagataccggcccccagcgcgtaggcctcattgctgagtccggtatccagctggtaggtctctttggcgaaaccgatattagaacggtcaagaaacgccagcacgtacaacgccagcataaaggggattaagcgggcgcggtttttcttcaccacgctctccagcagagtgttgctcatcataatatcctcaggcgcgggccgccgggcggcccgacgcaatcagtgttgataaggacgcttcaggttgcagtcgcgattgagctcgacgccaaagccgggtttatccaggaccgatttatgaatgcgccctctctccggcaccggctcgccgagcaggatcgggtcgaactgcgggcgcagcgtggcgcagtccggactggtcatcagaaactcactgaacggcgtgttggtgaaggtgatcaccgcatgatgtgagtaaaccgacgagccgtggggcactaccagctgcccgcgcgctttggcgatggccgcgatctccaccagggtggttaagccgccgcaccagccgacgtcgggctgcataatatcgatgccggtttccgacagggtgcggaaggactgcagcgtgccgtggtgctcgccgctggtcaccatcatcccggcaggcgcctggcgcttcagctcgcgatagccttcatactgctgcggcggcaggcactcttcgatccacttgaggttataaggggcgcaggcatgggcaagtttggtggcatagttaacgtcctggctcatccagcagtccagcattaaccagaaatccgggccgcatttttcgcgcatatccgccaccatggcgacgtctttgcggatcccggcgtcgccatcgtgcggcccccagtgggtaggcattttgccgccgataaagcccatctcctgcgccaggtccggacgtgcgccggtggcatagaactggatttcgtcgcgcaccgccccacccaacagtttgtagaccggcaggccaaccactttcccgaacaggtcccacagcgccaggtcgacacaggagatggtattcatcaccaggccgccggatcccgcgtagtaaagggtggcgttaagcatctggtcatggatcagtttgatatcgctgacgcatttgccttcgataaagcggttgagatgtttttcgacgataaagcagcccatctccccggccgtcgacaccgcaaagccggtctgtccgttgtcggcttccacttccacaatcagcgtccccagcacgttgatgccaaacgactgccgggactgctcatactgtttatatttgctcatcggggtggcgatatgatcgtcaatccagtggttagccccctggtcatggtaatcgccgccgccggcgccctgctctgctgtggcgccgccgatgaaccaggcgcggacgtgtttaattttcggtagggtcatgatgttctccttatgatgaggcgagttgttcgaaggggcttttccaccccagcagacgtgaaatatctttcgcgcaggcaatcgccttaccagccaggtaatcgcgattgtcttcattgatttgcagacgggtacccaccaccgagatggcggcggtcaggtcgttattggcgttaaataccggggcagccacgcagcgcacatccggatagtcctcgccattatcaaagctccagccccgggcgcggatccgccccagctcttcccgcagctgttgagcatcggtgatggtcgttggcgtggcccgctcccactgcaggtcttcgataatcgacgcctgaacgctggcgggctgccaggccagcaaacatttgccgatcccggagcggtaaagcgacaggctcttaccctcatgcgagcgcacgctgatggtggcgggagactcaattttcagaatgtagtaggcgttgccctgatcgataatgcccaggtgacaaagcaggccgcactcatccatcagccgggtgaggcgcggccgcgccagctcgcgcaggtccattttgctcagcgcctgcccggccagctccaccagcttggtccacaggcagtagttatcctgattatccatactgatgaagcgctgctttttcagctcgcccagcagcagatacaccgtgcttttcgggatccccagctccgctattatcgtcgccgcgctgcaggggccgatgcggccaattaaattgaggatctcaatcgcgcgggtcagcgccgggactttcgttgattccaacatactggactccaatcctgaatactggaatcagtgttgcgattgtccgggcggtaaagtgtgagcgacatcgcggggcaatcgttttcccgtatactggaccgttcgcagcagaaaattgcgacttaacgcacagaattttttcagaagagtacaacaggttggacgaccggcgccccgaggatacggtgcgccggggggaatgacttacagcgagagggaatccaccacgttaatccagccatgttcgctggccagcggttggccattcagccagcgacgcagcatgtttaacgccatcatagcgcagacttcctggcgtaccgccaggctgtggcgggtggcgctaaacttcacccgcagtgcgaaggtgccgtccggggtggccagggccacgttaagatgatcgttttcctgaccgctcaccgccagagccaggccggcaaaatggtttatgcgccgctcggccgcccagcgggccgcctgcgccagcgtctcctcctgcgccggaacgacttcgctggccagcagcggcgcgccggcgcgggacagctggagcgccagcaggccgctggtaaactgctcgctgagcgtcaggctcagctgccgctcctgcagacagcgggcgatctgcgccggtaacccttccgtgccttcgaaaatcaggctgtcgccagccaccttacgcacctccggccacagggccagcatggcgtcgcgctggttggccggtccggttagcttgagttcaatgatcggcatcgacgagcggtaacccatcaccacgcccggaggcagcgtcagcggattaagactttgcgccagctcgctctccgagcggccaaaggtggtcatacgcaggcataccggcgggtccggcagcgtaaagcgctggcgcaggcgcggtaaaatttcctgctcgaccatcaccttaaattcagaggggaccccgggagtgaaaaacatcaggcagcggttgagctggatggcaaagccacaggccgtaccgaccgggttgttgatcatctcggcgctggccgggatttccgcctgcttacggttgctttccgccatcggcctgccgcgctcggcaaaaaagcgggtcatggtttccagccactccggatgcaaaataagcccctcgcctttcgcagtggcggcggccagcgcgctcaggtcgtcgctggttgggccgaggccgccgttgacgatcagcacatccgcctgttcgctgcgttcgcgcagaatcgccaccagcgcatcgagatcgtcgccaacggtattgcggcgcgttaacggtaaaccctgattaaaaaagaaatccgccagccatgccgcattggtatcaatgatttgaccatgcaacacttcatcgccggtggacagcatttccacattcaacattgctcactccttgcctgccaggtgagaaatactataacgcaaagcgggatgctgacgaggaggaaaatctggcgcagcaagaagatgccgcgccggaagagattagaagctggcgctggcgccgatgtatgggccgtcggcgatggtgttatcgcggttgccatctttgcccgccaggttcaggtaacggtagccggcctggatgctaagcggacgcataatggtccagctggcgccgacgttggcttcctggtagctatcaatgccgctggagagcgaatccggagagtagtaataatcgccgtacaggcggaagctgtcgccgattttccactgcaggccgccgccgaccgcggccgcataaccttcatcgccctgtttcggattggtgtaaatacctttaccacccacggtcgcgaggaacggccccagcggaatattgagtcccaggcctaaacccgcggcgtcgccgtcgttatcgctgtgcagccagttacccgaaacggccaggccggtggactcggtgccgaagccgacgccaaggttggtgtaatgctcgccggcttcaccggtaacgctaatcgcatgggccgccgaagaaaccatcatcacgcccgccagcgccataaaaatgctttttttcattatttactctatccagaaaattaaaatcaaagaagtcccgaaaaaacctgaaaattctactgcgcacccatcaggaatcaatgacctggcgaaatgaattttcacaagagtgtaaccagttgcgtatttttacggcatcgagcgttgccagaaccacgaacagcctattcaacgccagtaatattcatgtttattatgattaacgctgacacattgacgaaaacagagagctggcgccgcacgatcggcgcggcgcgagtggataagggaataattaatgctgcagccgggccagacattccggggcgaggccggtcagtttcgccaccagcgacaggtcgagtccgttagcaagcatcgcccgggcgatacgctccgcggtctgctgctcaccttgctcgatacctttttcgataccttgttcgataccttgctgtagaccttgttcaagaccttgctttaatccttgctgatggccgcgttgttccagaaactgggcaatattcattagcgtctccttatgcggccgccgggggacgttttgcgcaagatggcgcaaaaaagcaaccggatcggcggcgtttcctgcctgtaataaatagtgcaacagcgtcttaagctgcctgcggctagtgtatcccagcgccaggagcctgaccagctgctcatgcaggtccatcaaatcccgctggcgaatatgcttctgcagcagctccagcatcgccacgcgccggtggcgcatgatttcatcgtccggggtgctagtgatatcaattaagggaaaatcttcaccatagatccgccgcgcgatgtccggatcggcaaagcctgccagccagcacatcgggtaaggccagggagaaacgcgaccatgataaaacagcagcgggatcaccagcggcagctgcgtatgccctttatccagatgacgctgcatcgcggctatcgcatagcgcatcaggcgaaatgccatatggcggtccgccgagctttggtgctctatcaacagatagatatagccctcccccgcctgcgtttgcagcgagtaaaggatatcggaatgactcgcccgcagttcgtcgtcgataaagctcccggactccagccgcagcgtgttcagattacataacgcgcgcagcggtgcgggaaggtgaatgtccagaaaatccctggccgtcgcccgatgcgacagcaggtgtttaaatacagcatcgtggggggaattcgtcgccctttccatggcggtgctccatacaatcattttcgcttaacgtagcactcaacaagacctgaactgtatttcgcttgcagtttaccgaggcggctcgcaaactatttcaccagcataccgccccatccctctgcaggagaaaacccatgcgccaaaggacgattgtttgcccgctgatcgagaatgaaggccattatctgctttgcaaaatggccgccgaccgcggggtttttcccgggcaatgggccttatccggcggcggcgtggagccaggggaacgtattgaagaggcgctgcggcgggaaatacgcgaagagctcggcgaaaaactcatccttacccatatcgcgccatggtgctttcgcgacgatacccgcgtcaaaacctaccccgacgggcatcaggaaacgatctacatgatctatctcatcttcgactgcgtgagcgccaatcgcgatgtgacgatcaacgaggagtttgacgattacgcctgggtcaaagccgaagatctcaaaaactacgatcttaatgccgccacccgcgttactctcagcctgaaagggctactttagtccagcataccgcgttcaacccacccggcgttatgccgcgggataatgcgggtggctacgatacggtcgcatgcgtctgctgcctgacccactcgcacagcgcccggcgcgaaatcttaatcccgccgttttttaacgtttccggcaaccgcagccaacgcaccggctgctgaaaacgcgctaaccgctcagcgctccatgccgccagcgcgctcaactcgcagccgtcatcgcattccaccaccgctaccgggcgctggccatattccgcatcatccagcggcacgataaacacctgctgtacctgtggatgggcgagtatcacacgctcgacctcttccggttgaataccttctccaccgctaaaaaagaggttatccattcgcccaacaaccgtcagccgaccgttatgcaatgctccgcgatcgcgcgtcgcaaaccagccttcattgttggttaatgacaacaattgaccatcccgccagtagcctgcggccatactcgacgcccgcagccagatctcgccggcgactattttcacctctcgccccggcagcgcttcgccaacatccgcagcgccgtcggcctctttggcacacacggtggaggcgaattcggtgaggccatagccgcagaagctgcgtatgccctgctttcgcgcccgttcagtcaattcgaccgggatcgacgcgccgccgagcagcaccgccttgagggaaaccgcagcatcatcattcagcaggcgccatagctgagtcggcaccagcgaagcatgggtacagccgtgcagcatctgcgccagcggctgtttgtcacgtaccgtgagtcgcgcgccggccagcagccagcgccagacgatcccctgaccggagacatggaacaacggcagcgacagcagccagtcatctcctgcggcaaacggcatcagcgccagcacgccagccgcgctggccagatgggcgttggcgctatgtaccgccgctttcggcaggccggttgaaccggaggtcaacgtcatcgacagcaaccgatcgccatgccagcaagcagcatgctcgccctcgaccaactgcagggttaacatcggtaaattccccggcaacacatcgccattcagcaccagctgatgctgcatggttaacgcgggtaacaacgcctgcagcaacaccgctggcagctgcggattcagcggcagcacccgcgccccgcactgtagcagcgccagccatgccagcagagtttccggctggttataggcccggagcgccacgccctgcccttccattacgccctgcgcggcaaaaccagacgccagcgcgtcaacccgcgcgcatagctcccgccaggtcagcggctggttattcagacgtaaggcgagggcctctccgcgccgctgacgccaatgccgccagggccagtcgttaaaggtcacagcagcggctccagcgcatcaatgttgagcaccggcagcgcactttcgggccacggccgtaccagctgggcgcccatcagcgacagcgtatccagcccaggaatagtctgcggcgtcagccaggcggcaatccgcgccagctgggtcaagccgaggctggactcgatcgacgagctgatcactacgctcaaccccagcgcatgcgccgcggcgacctgttgctgcaccttctgcaaactgccggttagcgtcggtttgatcaccaccgcacgtacgcccggctcggcgacaaagcggaaatccgcctcgcgcaggctttcatcccaggcgatagcgatccctgtctcgcggctaaaggcccgagaatcctcccgcgttttgcaaggttcttcaagaaaagcaatgcgctggcggtacgccggattaacgtatttggcgaactgttgcgctttgagcggcgtccaggcgcggttggcatcgagccgcagctgcaggtcggggatcgcctccagcagcagattgaccaccataccgtcgcggaccgcctcccagaggccaactttgaccttagcgaccttctcgccgggcatcgccgccagtctggcgaatagctcatccggatcgccggagcagagcggcgccgcgcgataatccgcggcctgcggtagttcgccgccaagctccgcctgcgcgcagctgatgccaaacgcgacggagggctgcgtgggaagcggcggctcggcgccgtcgcgccaggcctgtgcccacgctaacagcgccatttgcgcctcttccagcgtctcgacactgaatcccggcaggggagaaatttcgccccagccttcgcgttcaccctcctgcaggcggatgaacagcccgtcgcgggtttttaaccgccgctcgcgcagcaccacgcccgcgtccatcggtatctgccagcggtaaacctgcgaaacgcgcattatggattccgtttaaatttgctgaagtccggctgacgtttctggttgaaggcgttgcgtccttcctgcccctcttccgtcatatagaacagcatggtggcgttgcccgccagctcctgcagaccagcctggccgtcgcagtcggcgttcagcgccgctttcaggcagcgcaaggccatcgggctgttctgcagcatttcacgacaccagcgcacggtctctttttccagatccgccagcggtaccacggtattcaccagccccatgtccagcgcctgctgagcgtcatactggcggcacaggaaccagatttcgcgcgcttttttctgcccgacgatccgcgccatataggaggcgccccagccgccgtcgaaagagccgacttttggcccggtctggccgaagatggcgttttccgccgcgatagtcagatcgcacatcatatgcagcacgtgaccgccgccgatagagtagccggccaccatcgccaccaccggttttggacaggtgcggatctgacgctggaagtcgagcacgttaagatgatgaacgccggagtcgtcctgatagccgccgtagtcgccgcggactttctggtcgccgccggcgcagaaggctttctcaccttcaccggtcagcacgatgacgccgatattgtcgtcataccgggcatccgccagcgcctgaatcatctctttgacggtcagcgggcggaaggcgttgcgcacctgcggacgattaatggtgattttggcaatcccgtcagtcgatttgtgatagcgaatatcggtatagccttcggagcaatcgtgccattcaacgggggcgtagagcattgcttcatcaagagagatcatagaatgtccttcagttaacttgccagaatctgcgccagacaggcaatcaccgccgccgggttgtcccggtgcgcgttgtgtccggcatggtgaataagatggagatccgccgcgagcgtctgcgcgatggcgcgaaacttcgcgtcgcgctcgccgcacaggtagtgaaaaggaaaatcgcgcgcctgcagagacgcgcgcagatcggcctgcgcggcaagggaggttgcctgcagcatcgccgccagcatcgcgccgttgttccggctgcgtaaggcgaccaatgactcacgctgcgcggcattcagcgaagcgaagaccggctgctgataccagtcggcaaagacctgctcaagcggctcgcggcgaaaacgttccgcccaggcgcggtcattgctgcgccgcgcctgccgcgcctctgcatcctgcaggcccggatggccgccttcaacgatcagcccgcgcatgcctgcgcgcgcatggctggcgaagttcattgccacccggccgcccagcgagtagccgatcagccaatacttatgtatgttgtaactattaaacatagactgcagcagagtattgaccccggcaaagtcctgcaccgcgatatccgcggagccgccgtgccccggcagatcgaggtacagccgcggccaggcgggaaaggcgtcgcccactttccgccactcgttgcggtcgccggaaaaaccgtgcagaaacaccagccagggatagcccggctggccgttgtcgacagcagcgctgaggatcacaggcgacttacctgcgccagcagctgctggagggtctgcgcgccgtcggtctcattgaccgccagctcaatcaccgtcgcccctgccctgcgccaggcgccggccagcgcctcatccagcgacggccagtcatcagggcgatgataggccaggccgaacatcgccgccgcgtggctgaaatccacgtcctgcggcattaaatagaactgacggcgttcgtcctgcggcgtcggcagcatagaaaaaatctgcccgccgttgttattcaccacgatcagcaccagcggcgccgacgcctggcgcagcagggccagcgagttgagatcgtagagcgcggagagatcgccaacgatggccagcgtcggtcgggcgctggcgcgctgcacgccggccgcagtggcgatcaggccatcgatgccgctggcgccgcggttgctgtagaccggatacccggccggtagctgcgccagggcgtcgatcaggcgcaccaccaggctgttgccaacaaacaattggccctgctccggcagatagccccgaatacgctgcgccagctgcgcttcgccaaaaggctcgttgctggcgactgcagcctgccacgcctgcccggcaagctgtgggatcaccgtcgcccacggctggcgtttctccgccggatgtaattcgagccagcgctcaacgcttgagagcagacggcgaccgcggtgctgcgccgggtcgaggcgaccgggcagattatccaccagccagtattcatccggctcgcaggtcgcctgccactggagcacgcgtttgccggtcaggctgctgccgagttgcacgacgatctgcgcctgcgccagctcgctgaccgctttgccgttgcccagccacaggtcggcgcacggcagcggctgcccggtctgcgacaggacatcgccgatcagcggccagccgagggtctgcgcccactcagcgacctttttcccttccgcggcgctcattctgcccgccacgacgacgccgcgtttttgtcgccagaagaaccagtcgcgctgcttctcgctctctaactgcagcgcctggcgcagccagggtttgtcgctctgccaccagttgccgagctgctgctgccactccacgccggtctcatccatatcaccatacagcggttcagcgaacggacagttaatatgcaccccgccggcgtgcagcgcgcccagcgcctggtcgatggttgagaccagccagcgggcaggaatatcctgcgagggacgcggcaaagaaatcgtctgcgcaggatgggaggcaaacatccccggctggcggatagcctggttcgcgccgcagtcgatcagctccggcggacggtcggcggttaacaggatcagcttttcaccggtgagccctgcctcaatcagcgccggatagaggtttgcggtggcggtcccggaggtgactatcaccgccaccggctgccggctggccttcgccagtccgagcgccaggtggccgaggccgcgttcgtcgaaatgggtatgatggataaaggcgcggttttccgccgccgccagggttaagggtgtcgagcgtgagcccggcgcgatgcagatatgctgcacgccatggcgcgttaaagcttccaggatcaccgccgcccagcgtcggttaaatgcgcttactgacatgaaattgtccggtatcaaatattgatgctaagtatagataaggcaaagtgacgtcgttttgatatgcatcgtcattcaagctttatggacacagcagcgagcgcagcccggccgctttgttgtcaatctcctgccactcctgctgtgcatcagagccgctgacgatccccgccccggcatacagccgcagggtgtcgtggttcactttcgccgaacgcagcgccacgcaaaactcgctttgcgccagtgacagatacccggcggacccggcgtaccattcgcgggaaaacggttcatgacgctgaatgaacgccagcgccgcccggcgcggcaggccggccaccgcggcggtgggctgcagctgcagcagacagcggctgtcgtcaggcgccgccagctcggtccagatgcagcgtcggagatgctgcaccttacgcagcctcaccacctgcggcggcaggacgtccagcgtcgaggcctcactctgcaggcgctggcagatatcctctaccaccagcatgttttcccgctggtttttgtcgtctttcatcaaccagtcggccagttgctgcgccttcgcgtcttcctgatggttcgcgacggtccccgccagcgcttcggtgcgcagcagcgcgccgcgccggcgccacagccgttccggcgtggagccgaaaaatgcctgccgggcattgaacgccatcaggaaatgaaaacagttaagattgctgcgccggctagccgccatgatgctcatggcgtccagcggggcggcaaactgcaggtcggttgcccgcgccagcactactttatccatttcaccggcgctgatcgccttagtcgcccgcgcaatcattgcctgccattgaggatagtcggatgagtggcgctcgctcagcaacggcggtatggcaccgggagtcgcctgagtggttgtcaggctggcgagaaacgcgcgggccgtcgcggcatcctcacgcagggagatatcactatgcagcaccagccgcagcacggccctgccgccgcaccggcgccactccagacgcggcagcgccaggctgccctgctgcggttcaaacgcattcaggccgcagatacgcagatcctgccggccggcctggcgtaaaaagcggttcgccgcgtcgagcgagaaaaaggtttttaccgcccccagcgtcgccagttcctcatcgccattgcgctgctgccagtaaaactgcggccattgcgcctgctggccgcaccatagtagcggatcgaaggcatcattcagcggaaaggcaacatcgataattcgcgtgccgggcgagtctggaaaagactcgcccaggccgtcttgcaaacgggccagcgcagtggaaacagacagcacgcaaacctccacggtagtaaaaccccacattataaggggttcgacggcggaatagcagtacccatgatgagggagcgggttttatcttacccgctcgccgggtcagagcagcgtctggacgagggggcagaggagtcagacagcgcgcttttctcgcgccatgccaatatgggggatgccatcctcatcatagacctcggtcaccggcgtaaaaccaaagtgggcgtaaaaggattgcaggtgcgcctgcgccccgaggtaaatcgccttttgcggccagtgctgctgacagctggccagcgcctgctccatcagctgatagccaagcctctcaccgcgggcggccgtgctgacgataacccggccaatcaccaccggcgcaaactcctcttcgcttttgaggatccgcgcgtaggccaccagttcgccatcgcgccagccgagcagatggcgattttcaccaaccaaatcatcgccgtcgacatcctgatagacgcactgctgctctacgacaaagacttcactgcgcaatttcagcagcgcatacagctggggaacggtgagttcactatggtggagatcctgccaggtcatcatctgctgctccttattgatatactgatactttgcgactcgccctgaggacactggacgatggaattaacttttttggggacatccgccggggtgccgacccgcacgcgtaatatgacgtcgataatactgaatttgcaacagccgacccgcgctgaaatgtggttgtttgactgcggcgaagggacccagcatcagtttcttcacacgccctaccatcccggcaaactgaataagatttttattacccatctgcacggcgaccacctgttcggcctgcccggcctgctgtgcagccgctcgatgcagggaaactccctgcccctcaccctctacgggccaaaaggactcaaagagtttgttgagaccgcgctgcgcctgagcggttcgtggaccgactatccgctcaccatcatcgaagtcggccctggtctggtgttcgacgaagagggctatcgggtcaccgcgtatccgctcagccatccggtggagtgctatgggtatcgcattgcgcagcatgacaagcccggcaccctcgacgccgcccagctgattgccgatggcgtgcctcccgggccgctgttccatcaactcaagcgcggacagcgcgtcacgctggcagatggccgggtcatcgacggcagccgctatctggggccagcgaccccgggtaaaacgctgaccatcttcggcgataccgccccctgcccgcaggcgctggagatggctcgcggggcggatgtaatggtccacgaaaccacccttgagcaggcgatggcggagaaagccaatagccgcggccactcttccagtcagcagaccgcggcgcttgccaaagaagcgggggtcggtacgctgatcgccacccactttagctcgcgctacgatgccgaaggctgtctgcgtatgctggcggaatgccgggagattttccctaacacgctgctggcggaagactttatggtctacaagatggcgtaaaatccgggcataaaaaaaccgccatcccggcggttttttattgagtcaatcaacttacatcagcggcgtcgccagctgcacgatgctaatcagcggctgcggccagataccgagcaccagcaccagcagcgcggagatcagcaccacgataccgccggcgctgtactgccagtttgacggcgcatcgcgattcagttgctccggcgcgctcaggtacaggctgacggccacgcgcaggtagtagtagagaccgatcgccgagccgacaaccaccgcggcaaccagccaccacagatgcgcatgcacaccgacggccagcacgtagaacttaccgataaagccgagggtcatcgggatgccggccagggagagcatcatcaccgtcatcacagccgacaggatcggacggtgccagaacaggccgcggtaggagaacagcgagtcagcatccgggccgcggtacgggctggacatcaggctgaccacgccgaacgcgccgaggctgctgaacaggtaaccggccaggtaaacgcccacggcttccatcgacatttcaccgctctgcagggcaatcagcgccaccagcagatagccgagatgggagatggaagagtaaccgagcaggcgcttaatgttggtctggctcagcgccatcaggttaccgaagatgatagaggcgaaggcgatcaggcccagcaccacgcgtaccgcttcgctgttgcccaccggcatgtacaggaacagacgcatcactacgccgaagatagcgatcttgctggcggtcgccaggaaggtggagaccggcgcaggcgccccctggtaaacgtccggcgtccacaggtggaacggcaccagcgacagtttaaagccaagaccgacaatcatcaggccaagacccgccagcagcagcggctcgtgcagcatgttgtccgccaggcttttgcccagcgcgaggaaggacaggttgccggagttcgcatacaccagcgccataccgaacagcaggaaggacgaagctgccgcggagaggatggtgtatttgatgctcgcttccagcgaacgcttctggcggaaggcgtaaccaaccaggccgaacagcggcagcgaaatcagctcaataccgaggaacagcgccgccagatgattcgcaccggccagcagaatgccgcccagggcggcgatcagcaccagcaggtagaactcttctttgttgtccttgtaaccctcaagccacgggtaggcaaaagtacaggtcgcgaggctcgccagcagcaccagaccggtgtaaagcatggcgtagccgtcaacgcggatcagcggcgtgacgtccatcgccccgttctggccgacgaaccagagcgagaccagcgcggcgttaagtccaagaaccgacagcgtggcattgagaaaatgattgcgtcgccacgcaatggagagcatcacaaccaccaccgtcaagccgacgatcagcagcggtagcagtgcgatcagttgttgtggagttattgtcatggcgaattacggccttgtagtagaaacagaattaacaaaccactgctgaatgttgctcatcgcagcatgcgaggtgtcgaggatcggctgcgggaagaagcccaacagcaccagcagcaccaccagcagcaggatgatagacagttcacgcagggacatccccggcaactctttcgccgccacttcgctcttcgctttaccgaagtaagcgcgatgtaacatcgacagcgagtaaacggacgcgaataccagaccaaaggtggagatgacggtgatcgtcggcaccactttatagctgccgaacaggatcataaattcgccgacgaagttaccggtgcccggcatccccagagtggcgaccgcgaagaacatcgacatcgccggcagccatttaattttgctccacagaccgcccatttggcgcatatcgcgggtgtgcagacgttcgtacagctggccgcagagaataaacagacccgccgcggacagaccgtgagcaatcatctggatcaccgctccctgataggccagctggctgccggtgtagatagcaatcagcacgaagcccatgtgggacacggaggtgtaggcgatcaggcgtttaatatcggtctgggcgaaggccatccacgcgccgtagaagataccgatcacgcccagccacatagcgatgggcgcaaactcggcggaggcattcgggaacagcggcagcgcaaagcgcagcagaccgtaggcggcggttttcagcaggatccccgcgaggtcgacagagccggcggtcggcgcctgggagtgagcgtccggcagccagccgtgcagcggcaccaccggcattttcaccgcgaaggcgatgaagaagccgagcatcagcaggtattccacgccgtgagacattggggttttcagcagatcttcatagttgaaggtccacacgccggtggcgttgaagtggacgaaggccagcgccagaatggcaatcagcatcaccaggccgctcgcctgggtatagatgaagaacttggtggccgctgtgatgcgcgttttaccgtccgaggctttgtggccccacagcgcgatcaggaagtacatcggcaccaacatcatttcccagaagaagaagaacaggaacatgtcgatggcgaggaacacgccgataacgccgcccaggatccacatcaggttgaggtggaagaagccctggtatttttcgatttcacgccacgaacagagcaccgccagcacgccgaggagaccggtcagcaccaccatcagcagcgacaggccgtcgatcgccagatggatgctaatgccgaagcgtgggatccacggcagcacgaattccgactgccattgcggaatacccgcggattgcgtcagagaatagccgccctgcatccacagctgcaggccaagcaccagcgtcagtcccatggtaatcagcgcgatccagcgcggcactttcacgccaaagcgttcggtctgccagcacaggaagccgccgataaagggaattaatattagccagggtagtaacatggcgatttttattccttgttaaagtcccgttcaggaccgattttcaacgaattcgactacattcacgtttgagtgcggtttgttgtgtcgggtggcgcttcgcttacccgacctacggtctcgtaggcccggtaagcgaagcgccaccgggcaaaaccgcgcgatcaaatcaacgcaataccatcagcagcgccagcaccaccaccgcgccgatgctcattgaagccacataccagcgcagataaccgttctcgctcaccagcaggcctttgcctgcgaagcgggaaaggatcgccgggatattcatcaacgagttcagcggatcgcgtttcagcagccaggcaataccgaggaatggttttacgaacaccttgtcgtataaccagtcgaagccccaggcatggaaccaccaggtaccgaagaagcggccaggcgcactgttggcgatggaggtcaccagcgtgcgtttgcccagccacagccatgcagcgatcagaatcccggcaatggcgatgatcccggaggcaatctccagcgtcatcacgctaccgtgggcgagctcagtggtctgcggcagtacgccctccagcggcggcacaatcagcgcgccaacgaaggtggatagtaccagcagcacaatcagcggcagatgatgggtaatccccttccctgcgtgcgcgtgaatttgctctttaccgtggaatacgatgaaaatcatccggaaggtgtacagcgaggtcataaaggcgccgaccaggcctgccaccatcagattgatatggccattggccatcgcgcctgccagaatctcatccttactgaagaagcctgcggtgataagcggcagtgcggacagcgccgcgccccccaccaggaagcagacgtataccagcggaatcgatttgcgcaggccgcccatcttgaagatgttctgttcgtgatggcaggccagaatgaccgaaccagacgacaggaacagcagcgctttaaagaacgcgtgagtcatcaggtggaaaatcgccgcgtcccatgcctgcacgcccagcgcgaggaacatgtagccaatctggctcatggtagagtaggcgagaacgcgtttgatatcggtctgcaccagcgcggcgaagcccgccaacaccagggtgaccgccccgacgataccgaccagatgcagcacttccggcgtcatcaggaacaggccgtgggtacgggcgatcagatagacgcccgcggtgaccatggtcgcggcgtggatcagcgcagagaccggcgtcggacccgccatcgcatcggcaagccacgtttgcagcggcagctgggcggatttaccgaccgcgccgccaagcagcatcagcgtcgcccactgcagcgtggtgctgccgttagcgaagtgctgcggcgccagctccaccatttcgcggaagttcagggtgcccagttcgttataaagaatgaacagcgcgaaggcgaggaacacgtcgccgacgcgggtcaccacaaacgctttcatcgctgcggcgccgttcttcggatcggtgtagtagaaaccgatcagcaggtaagaacagaggcccacgccttcccaaccgaggtacatcagcagcaggttatcggccagtaccagaaccaccatgctggcgataaacaggttggtataggcgaagaagcgggaatatccctcttcaccgcgcatgtaccaggaggcgaacatgtggatcaggaagccgacgccggtaactacggagagcatggtcagcgacaggccgtccaacaccaggttgaagccgatgttgaaatcaccgaccgacatccaggtccacagcggcacgctgaccgcctgtttgccgttagcgaaaaagtcgacgccaacgtacgcggtgaccagcgccgccaggcctaccgagcccatgccaacggcggcggaaagattttccgaccagcgcccgcgggagaaggccagcagcacaaagccaatcaatggcaaaagaatggttaaggcaagcatgttcatccacgcaactcacttactgaatcgatgttcaggttctggcggcgacgatggagctgcagcagcagcgccaggccgatactcgcttccgcagccgcgaggctgatggcgaggatatacattatctgaccatctgcctgaccccagtagctacccgccaccacaaaggccagcgcggcggcgttaatcatgatttccaggctaatcaacataaacagcagattgcggcggatcaccagccccgtcagaccaagcacaaacaggatggccgcgaggatcagtccatgtgttaaggggatcatgcgtgttcctccgtttttcgtttgtcgctgtcgttcagacggttgctcagcacctcgccggcgcgctcttcgcggccaatgtggaaggcaaccaccaggcccgccagcagcagcatggaggccagctccaccgccaggacgtacggcccaaacagcgcaatgcccacttctttggcgttaatcgccgcaccgtcgataccctggtcgttaatgcccaggatggcgtaaacgataaccaccagcagcaccgcggagaggatggccgggccaatccagatccccggctgcagccacttgcgctcctgttcgatctcggtgccgcccaggttgagcatcatcaccacgaagacgaacagcaccataatggctccggcgtagacgatgatttccagcgctccggcgaagtacgcgcccagcgagaagaacaccccggcaatcgccagcagcgaaataatcaggtacagcagcgcatgcaccggattggtgtgggtgacgacccgcaaggttgcgaggatggctatcaggccacagatataaaaagcgaattccattgcccctctccttacggtaacaggctcttgacgtcgattggcttagcttcattttccgcttcgcccttatctttgccgtcgattgccatacccgccatccggtagaagttatattccgggtatttgcccggaccggaaatcagcagatcctctttttcgtacaccagatcctgacgcttgtattcacccagctcgaagtccggggtcaactggatcgccgtggtcgggcacgcttcttcgcacaggccgcagaagatgcagcgtgagaagttgatgcggaagaactccggataccagcggccgtctaccgtctctgctttctgcagcgagatacagcccaccgggcaggctaccgcacacaggttacaggcgacgcagcgctctgcaccgtccggatcgcgggtcagcacgatgcggccgcgatagcgcggcggcaggtagaccggctcttccggatacatccgggtttcacgtttggcgaaggcatgcaggccaatcatccagatactacggacctgggtgccgaaccccaccaataattcttttaaggtcatgttcaattcaccccttattgcgcctgccagagaatgacagccgccgttaccaacaagttgaccagcgttaacggcaggcataccttccagccaaaggacattacctggtcatagcgcggacgcggtaatgatgcgcggatcaaaatgaacatcatcatgaagaacgcggttttcagcgcgaaccagatgaaaggaggtaaccacgggccattccagccgccgaagaacagcgtgacgatcagcgctgaaacggtgacgataccgatgtattccccgacgaagaacagaccgaatttcatgccggaatattcaatgtggtaaccatcggccagttcctgctccgcttccggctggtcgaacgggtgacggtgacacaccgccacgccggcgatggcgaaagtcacgaagccgaagaactgcgggataacgttccacagatgcgcctggttattgacgatatcggtcatattgaatgaccccgcctgcgccaccacgcccatcagggagagaccgagaaatacctcgtagctcagggtctgcgcggaagcacgcatcgcccccagcagcgagtatttgttattgctcgaccaaccggcgaacagcaccgcgtagaccgccaggccagccatcatcaggaagaagaggatgccgatgttcaggtcggccaccacccacgtcgggctaaccggcacgatagcgaaggccagcagcagcgaggtaaaggcgataaccggcgccagagtaaagatcacgcgatcggagaagcgcgggatccagtcctctttaaagaacatcttgatcatgtcggcgaccagctgcagcgaaccgccccagccgacgcggttaggtccgtagcggttctggaacaagccgagcagacgacgctcgccgaagctcatgaacgcgccgcaggtgacaaccaccagcagaatgaccacggccttcaggatgcttaacagaatgtcgataagatccggcgttaaccagctcatgctttcgcctcctgcagtgaatcaatacgcgatccggtcagcaccggcgcaatgcccggcatgcccatcggtaagccaacctgtcccgcggtcaggccttcagagataaccagcggcagacgcagggtctggccttccacgctaaaggagagcattgcgcctgggttgacgccaagcttcgcggcatccgccgggttcagcttgatgtacggctcaggcatccggctctggaacaccggcgcgcgctgagacagctcatcgctgccgaacagatggtagtacggcgcaattcgccatttgccctcttccgcctggaagctggccggcaccgccgtgaagtactccagtccgctggcggacgcttcaaacagacgaacgcccggatcgccgtggcgcagtttcccgcccacttcatcctggaacttgttccatgcctgcggggagttccagcccggcgcccaggcgaacgggatctgcgaacgcggggcggacggctggttgttcccttccatggagaaggcgaacatcgtgtctttatcctgcggctgacgcggctcgtgcacgctgatgttagcgcgcatcgccgtgcggccgctgtagcggtgcggttcacgcgccagcttctggccgcggatgcggaaggtcgcatccggcgcggcgtctttaatgcccgccagctgcggcagcgccgcaatcgccgcatcaatgacgtggtccagctgagtccagtcaacctgacggttgttgacggtgctgtgcagcgaatgcagccagcgccagctttccagcattacggttttcgcgtcgtagtaagccggatcgtaaacctggaagaaacgttgggcgcggccttcgttgttcaccacggtaccgtcgctttccgcaaagcttgccgcggagagcaccaggtgcgctttgtccataatcgcggtgcgctgatgatccaccaccatcaccagcggcgctttcgccagcgcagcgtcaacgcgcgcggcggaagcatgacggtgaaggtcgttttccagcacgataaccgcgtctgcggcgccgctttccagttcgtccagcgcctcttcaagcgagccgccgccgatcatgcccagtccgacgctgttaaccgcccgggcgaccatggtcaccccgacatcggcgccgcggcctttcagagctttcgccacgttagcggcggcctggatgatctccatgctgcctgcgttggtcccggagatgatcagcggttttttcgccccggccagcgcctgaacgataacgtcgactttaccctgcaggtcctggctcaggccgtcaaccgccggcgcgctgtcgtccagcgcatgggcaatagcaaagccgagacgcgcctgatcttctaccggcgcgcggtaggtccacgccgcgatgtcatccaggcgggtgtcatcgacgttggtgacgaatagcgggtgcttggcgcgctggccgatgttgaggatcgcggcgatctgccagtcggccactttctgcgccgccgccatttcgcgtgctttccctttcactgcctggcgtaccgccagggccacgcgcgcgccggtctgggtaatgtcttcgcccagcaccagtaccgcatcgtaggattcgatatcgcgcaggcttggcgtgtggatcccgccctcgcgcagcactttcagcatcatctgcaggcgcgcttgttcgcctttggcgataccggtatagaagttgtcggcgcccaccagctcgcgcagcgcgaagttgctttcaatgctggcgcgcggggagccgatgccgatcactttcttcgactggcgcaggatatccgccgccccctgcatcgcctgctcggcgttaagggtgatcagatcgtcgccgcggcgctgtaccggctgacgcggacggtctttcaggttcacgtagccatagccgaaacgaccgcggtcgcagaggaagtagcggttcacggtaccgttatagcggttttcgatacgacgcaactcgccatagcgttcgcccgggctgatgttacagccgatggaacactgctggcagatgctcggcgcaaactgcatgtcccacttacggttatagcgctcggagtgggttttgtcggtgaaaacgccggtcgggcagacttccaccaggttgccggagaactcgctctccagggtgccatcttccgggcggccgaagtagacgttgtcgtgcgcgccatagacgcccagatcggtgccgtcggcataatctttgtagtagcgcacgcagcggtagcaggcgatgcagcggttcatttcgtgcgaaataaacggccccagatcctgattgcggtgggtacgcttggtgaaacgatagcggcggaagctatgaccggtcatcaccgtcatatcctgcaggtggcagttgccgccctcttcgcagaccgggcagtcgtgcgggtggttagtcatcaaccactccaccacgctttcgcggaactgcttcgcttcgctgtcgtcgatagaaataaaggtgccgtcggatgccggagtcatacaggacatcaccaggcgaccacgcgtgtcttccgcgttctgatattgcttcaccgcacactggcggcaagcaccgacgctccctagcgccgggtgccagcaaaagtagggaatatcaagaccaagagagagacaagcctctagcaggttgtccgccccgttgacctcgtattctttgccgtctacatgaatcgtagccatttgcgtgcttccaaaaataaaaaacctttagattaccagcgcgtcttaagcaggttcggctgaatcccgttgattgcatgggtattgctgaactgctgcttaatgccagcctcgaattcttcgcggaaatatttaatcgcgctctgtagcggctcgaccgcacccggcgcgtgcgcgcagaaggttttacccgggcccaggaatcgacacagttgctcaagggtttcgatatcgccaggctggccttcgccgcgctccagggcgcgcaggatcttcacgctccacggcagaccatcgcggcacggcgtacaccagccgcaggactcgcgggcaaagaactcttcaaggttacgcaccagcgagaccatgttgatctcgtggtcaacggccatcgccagcgaggtgcccagacggctgcccgctttaccaatgctttcgaattccatcggcagatcgaggtgcgcttcggtgaggaagtcggtccctgctccgcccggttgccaggctttaaacttcaggccatcgcgcataccgccggcgtaatcttcgaggatctcgcgggcagtggtgccgaacggcagctcccagacgcccggattcttcacccggccggagaagcccatcagcttggtgccagcatctttgctggtggaaatgttctggtaccactcgacgccgttggcgaggatcgctggcacgttgcacagggtttctacgttgttgacgcaggtcggcttgccccagacgccggagctcgccgggaacggcggcttggatcgcgggttggcgcggcggccttccagagagttgatcagcgccgtctcttcgccgcagatatagcgccctgccccggtgtgcacgaacagctcgaagtcaaacccggtgccgaggatgtttttccccaacagacccgcttcggtggcttcagcaatcgcgcgacgcagatgctgggccgcttcaatatattctccgcgcaggaagatgtagccgcggtacgctttcagcgcaaacgcggagatcagcatgccttccaccagcaggtgcggcagctgctccatcagcaggcggtctttataggtgcccggctccatttcatcggcgttacacagcaggtaacggatgttcatggattcgtctttcggcatcaggctccacttcagaccagtagagaagcccgcgccgccgcgccctttcaggccagcgtcttttaccgccgtgacaatctcatccggggccatcccggtcagggctttacgcgccccttcatagccatttttactgcgatactcgtccagccacaccggctgcttgtcgtcgcgcaggcgccaggtgagcggatgcgtttccgcagtacgaattacggttttcatttgtactgctccagcaggtcaggaattgcctccggcgtcagatggctgtgagtatcctcatcaatcatcatggtcggtcccttgtcgcagttacccaggcagcaggtcggcagcagggtaaagcggccatcaaaggtggtctgccccggcttgatattcagtttcttctcaatggcggcctgaataccctgatagccggtgatgtggcataccacgctgtcgcagtagcggatcacgtgacggccaaccggctggcggaaaatctggctgtagaacgtcgccacgccttccacgtcgctggccgggatccccagcacatcggcgatagcgtagatcgcgccatccggcacccagccgcgctgtttctgaacgattttcagcgcttcgatggacgccgcacgcgggtcttcgtagtggtgcttctcgtgctcaatagcctcacgctctgccgcactcagctcaaaagcctcggtttgtggttgttgattctcgtgcataattagcggtccacgtctgacataacaaaatcgatactacccagatagacgatcaggtcggataccaggctgccgcggatcgccgacgggatctgctgcaggtgcgcaaagctcggcgtacgcacgcgggtgcggtagctcatggtgctgccgtcgctggtcaggtagtaactgttgatccctttggtcgcctcaatcatctggaaagattcgttggccggcatcaccgggccccacgatacctgcaggaagtgggtgatcagggtttcgatatgctgcagcgtgcgctctttcggcggcggcgtggtcagcgggtgatccgctttgaacgggccttccggcatgttatcgaggcactgctgaagaatgcgcagactctggcgcagctcttctactttcagcatcacgcgggtgtagcagtctgagacgccccccccggtcgggacttcgaagtcgaagttttcatagccagagtaaggacgccatttacgcacgtcgaagtcgataccggtggcgcgcaggcctgcgccggtggtgccccactccagcgcctctttggcggtataggctgccacgccgacggaacggcctttcagaatggtgttgcgcagggcggccttctcataggagtccagacgcttcggcatccactcgaggaactcacgcagcaggcgatcccagccacgcggcagatcgtgcgcgacgccgccgatgcggaaccacgccgggtgcatacggaacccggtaatcgcttccaccagatcgtaaattttctgccgatcggtaaaggcgaagaagaccggcgtcatcgcgccgacgtcctgaataaaggtcgagatatacagcaggtggctgttgatgcggaacagctcggagagcatcacgcggatcacgttcacgcgatccggtacggtgatcccagccagtttttccaccgccagcacgtacggcatctcgttgacgcagccgccgagatattcaatacggtcggtatacgggatgtagctgtgccaggactgacgctcgcccatcttctcggcgccgcggtggtgataaccgatatccggtacgcagtcgacgatctcttcgccgtccagctgcagaataatgcggaacgcaccatgcgccgatgggtggttcggaccgaggttgaggaacatgaagtcctcgttgtcggtgccgcgcttcatgccccactcttccggtttaaaggtcagcgcctccatctccagatcctgtttggctttggtcagctcaaacgggtcgaactcggtggcacgcgccggataatctttacgcagcgggtgaccttcccaggtcggcggcatcatgatgcgacgcaggttcgggtgaccatcgaaggtaatgccaaacatttcccaggtttcacgctcataccagttggcgttggggaacagtttggtgaaggtcggcagatgcagatcgttttccgacagcgccaccttgagcatgatgtcgcggttgcgatcgatggagatcaggtgatagaaaacggaaaaatccgcggcgggcaggccatcgcggtgcgtgcgcagacgttcgtccatgccgtgcaggtcaaacagcatcacgtaaggcttcggcaatttcttcaggaaatcacccacctccagcagctgttcacgcttcacccataccaccggtacgccggtacgggttggctgaacggtaaaggcatccggcccaaagcggttgcgcagttcgccaatcaccgggtcatcaaggtgatcgcgggtttgccaggctggtgcggcgtcatgcgcggttaaatcggtcatattgttcaccattgcaaaaggtccgtggtgactgccggcgagacttcgcgctgttgtagattgatttgcgaagtggttctcccgcccgcaggcgcaaattaaatctcgtccggcgtccgcagattggtcactgcaatacgttcgccgcgtttacgctcgcgttccgactgcatattggcgcgataaacgccctgatcgccaaccacccatgagagcggacgacgttctttaccaatggactcctgcagcagcatcagcgcctgcatataggcctccggacgcggcgggcagcccgggatgtacacatcgaccggaatgaatttatccacgccctggacgacggaatagatgtcgtacatcccgcctgagttggcgcaggcgcccatggagatcacccacttcggctccagcatctgatcgtagagacgctgaataaccggcgccattttggtaaagcaggttcccgcgaccaccatcaggtccgcctgacgcggagaggcgcgcagaacttctgccccaaaacgcgcaacgtcatgcaccgcagtgaatgacgtcaccatttccacataacagcaagaaaggccgaagttgtacggccaaattgagttcttacggccccagttcaccatgtcatgcagcgcgtgttcgagtttccccatatacacgcttttattgacttcctgctccagaggatcggtaacgatctcctgtttctgcaggggataacggtcgttctcaccgttaggatctatgcgggtgagcgtataatccatcttattgcctcgcttttactgcatatgacggttagtgggactgtctgtttccgggttaaccagcgtgcgacgggaacgcgcaggcgtccagtccagtgcgccgatgcgaacgagataaaccagaccagccagtagcactaaaatgaaaattgcggcttccacaaagccgacccagccgctctcgcggatagaggtcgaccatgcgtagagatacagggcttccacgtcgaagataacgaagaacatggcaaccagataaaacttcgcagaaagacgtaagcgggccgaaccgacggagtcgatccccgattcaaacggcgtgtttttactacgcgcgcgcgcgcgaccgccaaggtaccagccgccgacgagcatgaggcagcacaggccgatagcgatgatgagaaatatagcgaatgcccaatgatgagcgatgacttcagtggatgttgacatacgcattgcttaaccaaaaaagtgtagcgccaaaaccctctgctcttactggcagatgaacgccacagcgtttcacgggaggaataaaaaataaccgtgcaaaaaagcgtccctggtcgatgtgagaagcccagatgccgtggctttttacccctttctttaaccttttgtcaactttaacaaaagttttcataacattaatttacattggaatcttttcattaacattaaatgcccttttctgcgaaataaccttgcatactgttcggttttagtgttgttgaatcgtgtccgtttccgtcgtaaatcaaaaatcccttctattttgacaggatttagcctcgattcctccccccaaagaggggtattttcttgatctgcgacacggttttgttaattaccccaggaaatcggcaacaatccatccggttttttaacattagcaggaagtgttgaaagtgcagggaaaagtcgacaagctgagcgccttgtcacgccaatacgctgatttttctgcaaagaaatacaaaaaagattcaaaacatcaataagagtgcaaaaaaaagagccgccaggcgggaaaccaactcctgaggctctttttgggcacttacattctgttaccagtttttgtgatctttgttagcaagaatacccttacaaaaccaaggtattccctccctcttccggagtaagtgctgtgcccgtttcccagggatggatctcctggctcagagactgaaaaatcgcctgcggcagttcgctcaccgtccgcggattgcagctgacgacgtaccgggtgtccggcaacgccggtaacccctcactgatgccagccacgcgtagatccgggctcatcatttcgaccgggcgcgccgtcacgcccagcccggccttcaccgccgctttcacgcccgatagcgaggaagctccgtgggccagatgccaactgacgcgagcagtttccagcgcggcgataatatcctggcggaatggacttggctcttcgagcaggatcagggggatagattcccccttcgccagcacatattccgctgcacaataccagagagtaggtgatgttctcagggtaaaagaggtaaagccgggaggctgatgggtggtcaacgccagatcgaccagcccctcggccagcatctccatgatggcggcatggggatgaactttgatctccaacgtcattctgggatagaaacagccgatgcggtttaacaaaaacggcaggatggtgtcagccgtttcttctgacgcaccgatgctcagagccccctgcaggctgccatacatcagcgacatacaggcttcatcgttaaaacggagaattttgcgggcatagcccagcagctggatcccctgctcggtcagcagcttattgcggccgtggcgggcgaaaagctctttgcccaccagctgttccaggcgttgcatttgctgactgaccgcggactgagtacgacacactgcggcggcggcggcggcaaaagtgttcaaatcagcgaccgcgacaaaggtacgcagcagatcgagatcgaggttgagtatgggacgtgttgtattaatcatctttcttcacttacaggtggctaacgctgacctgccttgttgatgctttacgccaggtttccggctattccctgagcctcgtgctcaccgtctaacggcggataaacaactggacgaacgttattacatgccaaagtactcgtctgggcaaatgcgcagaactgcggaataatatattgttcgtatttctcattattatttattaccacgaccagccaggcgccatacnnnnnnnnnnnnnnnnnnnnnnnnnnnnnnnnnnnnnnnnnnnnnnnnnnnnnnnnnnnnnnnnnnnnnnnnnnnnnnnnnnnnnnnnnnnnnnnnnnnnnnnnnnnnnnnnnnnnnnnnnnnnnnnnnnnnnnnnnnnntattaacggtgatattctaacctatccccctcctttttataagccttaataaggattaactgagacaattttaaatttttttcaacattttatattaattaacaaacctcagattattacccgctaaaaataataataatgtggtcgcacgctgttttttattaaaattatttaacatcaaaattacaagccaatcgcgcttgtatgcaggatagcgttttttagcgactcccccttctccctccccatattaccgggcaaacaaacgagataaatgatggcaaaatcgctactaaatctatatttacgaccaaaaaatcgacataaaaaggcataagccacagaccaaacccgcaatcggtagataaatcaattgcgcttaaaatccggcgttagcaaaatcttctcctgcaaagccttcaaaacagcggggagggggagtacattgttccgtgctgacttccacggcagggagtggcgataacagctaaaaggtcaagattcatgtcccccatcgaaaaatccagcaagttagagaacgtctgttatgacatccgcggcccggttctgaaagaagccaaacgtcttgaagaagaaggcaataaggttctgaaactgaacatcggcaacccggcgccattcggcttcgaggcccctgacgagatcctcgtcgacgtcatccgcaatttgcctaccgcccagggttactgcgattcgaaaggattgtactcggcgcgtaaagctatcatgcagcattaccaggcccggggtatgcgcgatgtcacggtggaagacatctatatcggcaacggcgtgtccgaactgattgtgcaggcgatgcaggcgctgttaaacagcggcgatgagatgctggttcccgccccggactacccgctgtggacggcggcggtgtcgctttccagcggcaaagcggtacactatctgtgtgacgaatcctctgactggttcccggatctggacgacatccgcgcaaaaatcacaccgcgcacccgcgggatcgtgatcattaaccctaacaaccccaccggcgcggtctattccaaagaattgctgcaggagatcgtggagatcgctcgtcagcataatctgatcattttcgccgatgaaatttacgacaagatcctctacgacgaagcccagcatcactctattgccgccctggcgccggacctgctgacggtgacctttaacggattgtcgaaaacctaccgcgttgccggcttccgtcagggctggatggtgctgaatggcccgaaaaaacacgcgaagggctatatcgaagggctggagatgctggcttcaatgcgtctttgcgccaacgtgccggcccagcatgctatccagacggcgctgggcggctatcagagcatcagcgaattcatcatccccggcggacgcctgtatgaacaacgcaaccgcgcctgggagcttatcaacgatattccgggcgtctcctgcgtgaagccaaaaggcgcgctgtatatgttcccgaaaatcgacgccaaacgcttcaatattcatgacgaccagaaaatggtgctcgacttcctgctgcaggagaaagtcctgctggtgcaaggcaccgcctttaactggccgtggccggatcacgtacgcatcgtgaccctgccgcgcgaagacgacctggagatggctatctcccgctttggccgcttcctctccggctaccatcagctttaatcgcgccgccgccggcatttgcatccggcggcgatccctgcgcacaatggaacccgatgttgtcactgattaagggtccctatgagtcagagtcatttctttgcccacctctcccgcctgaaactgattaaccgctggccgctgatgcgcaacgtgcgcaccgaaaatgtctccgaacacagcctgcaggtggcgatggtcgcccacgcgctggcggcgattaaaaaccgcaaatttggcggccaggtcaacgccgagcgtatcgccctgctggcgatgtaccatgacgcctcggaagtactaactggcgacctccctactccggtgaaatatttcaattcgcagattgcccaggaatataaggcgattgagaaaattgctcagcaaaagctggtggatatggtccctgacgagctgcgcgatattttcgagccgctgattgatgagcatcactacagtgaggaagagcagtcgatcgttaaacaggctgacgccctctgcgcttacctgaagtgcctcgaagagctatctgcaggcaataacgaatttctgctggccaaaggtcggctggaaaagaccctggcatcgcggcgcagcgcggagatggattactttatgcaagtgttcgtcccaagcttccagctgtcgctggacgaaattagccaggattcgccgctgtaaggttctggccgggcggcggttgtgctctacccggccagaatatcttaaaacggaaacagtaccgggatcagcaggacgcagaccaccatcaccagtatggtaaagggcacgcctattttgacaaaatcgctaaatgagtacttgccagggccaagcaccagggtgttaaccggcgaggagaccggggtcataaacgccgccgaagccgccatcgccaccaccatggcaaaaggatagggagagacgcccattgacttcgccgccgctaaggcaataggcgccatcagcaccgccgtggcggtgtttgagataaacagcccaatcgccgcgcacatcatgaacaggcagccgagcatcagataaggcccctcgcctccggcgacatccatcagtcccttcaccaccagatccaccccgccggttttttgcagcgccagggcaaacggcatcatcccaacaatcaaaataatgctcggccagtggatcgccttgtaggcgctctcggcattgatgcagcggaatttgcccatcagcagacaggcgataatcgcggcaatcgggttgggaatttcatcggtgagcatcagggctaccatcagcaccaggcagaaaatcgcatgcggagcctggctgtgggccggcgaagcgtcatcgacctcaaccggcatattgagcaccacgaaatcccggccgcgcttcgccagcagggcaatttgccgccagttgccgaccaccagcaggatatcgccgagctgcagcggctcgtcgaccaccgaaccatccatcgctttgccatcgcgcttcatgccgacgatattgagaccaaaccgggtgcggaaggctatctcacgcaccgttttgccaatcatctctgaatccgggatcagcgccacctccgccatccccacatccagcgcctgatcggcaaaatactcgccgcgcagcaccatcggctcaagcatttgctcgccgcagaactggcgtaaatcgacatcggaggcggacatatcgatcagcaggacgtcgcgggcgcgaaattccgataccccgttgacgttgacaattacccggcggaaccgccgccagcgttcaacgccgatcacgttggcgcagtagcgctcacgcagctttaaatcatccagccgctgaccgatcatcggcgaacccgggcggatggccagccggcgagcgcggccggtgaggtgatattcgcggatcaaatcgcggaaggtgcttctttttcgcccatcgcgtgcggagtcgccattatccgtcttcagcataaagcgcaccgccagcatatagacgatgcccaggatcagcaccaccaggccaatcggcgtgacgctgaaaaagctgaagccgtgcagtccctcgcgcagcaattcactgttgaccaccaggttgggcggcgtcgccaccagggtcatcatcccgctgataagcccggcgaagctcagcggcatcatcagccgcgatggcgaggtattcatccgcgccgagacgctaagtaccaccgggatgaaaatggcgaccaccccggtggagctcataaacgcgcccagaccggcgacggtgagcatcaggtagatcagcatcttggtttcgctgttccccgccacgctcaccagccatgcccccattttggtggcgactccggtgcgcaccaggccatcgccgataataaacagggcggcaatcaggatcacgttaggatcgctgaatccggaaaaagcttcatttaacgtcagcgttccgctgaggacaaaggcgacaatgaccatcagggcgatagcatccatgcgcaccttgccggtagcaaacagcacaaccgcgatggccaggagggataaaacccaaatcaattcaccgttcacaacgtttccttgtcacaagtgggagtcgacatagtggcataaaaaagccccgacgacgcggggcgaaatcatgggtttacgctttaagacgcacatttaccacgccgtcagtctggcgttcaaccaccagatcttccaggctgctcagcacgaggtcggcttcatccaggcgaggggcatcggcgggcacgttgaccgcgatagtgcgacagccggccgccagtccggagaggagccccgccggcgcatcttccaccaccgcgcactccccggcaggcagacccagccgctcggcgcccagcaaataggcgtccggcgccggtttgccgtgtttcacctgctcggcggtgacgaacacctcaggcatcggcaggcccgccgcgcgatgacgcgcgtgggcaaccggaatcgagccggaggtgacaatcgcccacgggatcccggcctcattgagcgtattcagcagggctaatgcccccggcagcgcgacgataccctcaatatcagtggcttctatctgctcgaggtagcgaaattcggcctggatatcctcctcgctgcgccccggcataaaatggcgaatggaggtaatggcctgcttgccgtgaataaaactgagaatttcatcatggtcaatggcgaaacgatcgccccacttgcaccatgaacgctctaccaccggcaaggaatccaccagcgtcccgtctaaatcgaacaggaaacctttacactgcacgggcacctccctcaggcgttgataatttgattaatttcattactgctcagatgatactggcgcgggcaagcgtgccagacgctcagcatccgctgatatttctcccacatcggggtctgcgagttaaagccatgggtaccggcgtcaaaatggctgtagcggccttcaacgttgaccataaaacgcacatagccgagataacgcgcttcggtggcggcatcaaatccgaggaaggtgacccggcgttcatcgatacccgccgcgtctttcaggttggtccaggagacgtgcagcgcgtggtacatctccatgatatcaataacggtacggcaggtttcttccgtcagctggccgaactcgcggtccagttcacgcatctgtagcccatacccacgctctatgatggtttgcagacgacggtagcgttccgcattatccgggtcgagcatcgtcatcattttgtactgattggataaaatcagacgctgcgcattggtcatttccatgttgtgactcctgtagcacggtagggcgtgaaataaagaaggcgcataaatcatgcgccttcttttatatgcgttttccgtagtgaattacaaatcatcaaggaaagttttatccagttgtttgaaggcgcgcttaagcgtgtcagccagcgcctgataatcgggcttgccttcgaccggtgccagcgcctgccccgcctcctgcagtttgccgcgcacttcatagaaccagttaagaatggaaggcggcagcggcgtcaccgaacgcttacccaaccaccagagtccctgcatcggcaggctcagcgcaaacagcgcggtagcgacggcggggcccagctggccgccaagagctatctgccagcagagggtaaaaatggcgattggcggcatgatgcggatggcatagcgggtggcacgaataatgcggttttcaataaacaccggcgcgaggcgcttgtcgagaggccaggtctttgcgtaatgctgcccgcggttgaacaagctaaagaagctaacggggcgtttctcaggggtcgacatggctttacctcaactttacatataaaacttaaaaaattcgtgcaaaacaccaactatgcatgacatcgttcaaaagattttggcaaaggatgccgcaatcaggtatcctgtgcccgcctgaaagggcggttagactctttgccaggctagtcaaattatcgcatattctgccattggctgaaaattatgcaaaatggcataaaatcaaatgtacttctctcatcgtgcccgaaaacagaacaaggcatgatgttaatcataaatgtcgaggtcatcctgcgctacgctaatgacacactgacgtttttttagccacgtatcataaaaaggtacttccatgtcgagtaagttagtactggttctgaactgcggtagctcctctctgaaatttgctatccttgacgccgtgaacggcgacgaatatctgtccggtttagcggaatgcttccacctgccggaagcccgtatcaaatggaaaatggacggcagcaaacaagaagccgagttaggcgcgggcgccgcgcacagtgaagcgctgaactttatcgttaacactattctggcacaaaaaccagaactgtctgctcagctgaccgcaatcggccaccgtatcgtacacggcggtgaaaaatacaccagctccgtggtgatcgacgagtccgtaattcagggtattaaagacgccgcgtctttcgcaccgctgcacaacccggcacacctgatcggcatcgctgaagcgctaaaatccttcccgcacctgaaagacaaaaacgtggctgtattcgatacggcgttccatcagaccatgccggaagaatcctatctctacgccctgccgtacagcctgtacaaagagcacggcgttcgtcgttacggcgcgcacggcaccagccacttctacgtgactcaggaagccgctaagatcctcaacaagccggtggaagagctgaacatcatcacctgccacctcggcaacggtggttctgtttccgctatccgtaatggtaaatgcgttgacacctccatgggtctgaccccgctggaaggcctggtgatgggtacccgctccggtgacatcgatccggccatcatcttccatctgcacgacaccctgggcatgagcgttgacgcgatcaacaaaatgctgaccaaagagtccggcctgctgggtctgaccgaagtcaccagcgactgccgctacgtggaagacaactatcaggaaaaagccgacgctaaacgcgcgatggacgtttactgccaccgcctggcgaaatacatcggttcctacaccgcgctgatggacggccgtcttgacgccgttattttcaccggtggtatcggtgaaaacgccgcgatggtgcgtgagctgtcgctgggcaaactgggcgtactgggctttgaagttgaccatgagcgtaaccttgctgcccgcttcggcaagtctggcttcatcaacaaagaaggcacccgtcctgccgtggttatcccgaccaacgaagagctggtcatcgcgcaagacgccagccgtctgaccgcataattccacatcgccagccctgacccgcaataattcgagctgcaggaaggcggcgacacagcaaaaccccggccgcgtacagcgcgtacgccaccggggtgagcaagtagagccaacgcacgtgcaacttgaaatatgacggatagctggcggtgctgttttgtatcccgcctgatactggcggtaacgaaagaggatataccgtgtcccgtactatcatgttaattcctaccggtaccagcgtaggtctgaccagcgtcagcctcggtgtgatccgcgctatggaacgcaaaggcgttcgtctgagcgtctttaaacctatcgcccagccgcgttccggtggcgatgccccagaccagaccaccaccatcgttcgcgccagctcctccaccaccaccgccgctgaaccgctgaagatgagccatgttgagtctctgctctccagcaatcagaaagatgtgctgatggaagagatcattgccaactaccacgcgaatactcaggacgcggaagtggtgctggtggaaggcctggtaccgacccgtaagcatcagttcgcccaggcgctgaactttgaaatcgccaaaacgctgaacgctgaaatcgtcttcgtgatgtctcagggcaccgacacgccagaacagctgaacgagcgtatcgaactgacccgtaacagctttggcggcgccaaaaataccagcatcaccggcgttatcgtcaacaaactgaatgcccctgtcgacgatcagggccgtacccgtcctgacctgtcggaaattttcgacgactcgtcgaaagcaaaaatcgtgaagattgacccggctcagctgcagaaaggcagtacgctgccggtgctgggcgcagtgccatggagcttcgatctgatcgcgacccgcgcgatcgacatggctcaccatctgaatgcgaccatcattaacgaaggcgatatcaatacccgccgcgtgaaatccgtgactttctgcgcgcgcagcatcccgcacatgctggaacacttccgccctggttctctgctggttacctccgcagaccgtcctgacgtgctggttgcggcctgcctggcggcaatgaacggcgtggaaatcggcgccattctgctgaccggcggctatgaaatggacgcacgcatcagcaagctgtgtgaacgcgctttcgcgaccggcctgccggtatttatggtcaacaccaacacctggcagacctccctgagcctgcagagctttaacctcgaagtaccggttgacgatcacgagcgtatcgagaaagttcaggaatacgtggccaactacatcaacgccgactggatcgaatcgctgaccgcgacctccgagcgcagccgccgtctctctccgccagccttccgctaccagctgaccgagctggcgcgcaaagccggcaaacgtgtcgttctgccggaaggcgacgaaccgcgtaccgtgaaagcggcggcgatttgcgccgaacgcgggatcgccacctgcgtcctgctgggtaacccggatgagatcaaccgcgtagccgcggcccaaggcgttgagcttggcgccggcattgaaatcgtcgatccggaagtggttcgcgaaagctatgtgggtcgcctggtcgaactgcgtaagaacaaaggcatgaccgaagcggtcgcgcgtgagcaactggaagacaacgtggttctcggcaccctgatgctggaacaggacgaagtcgacggtctggtatccggcgcggttcacaccactgccaacaccattcgtccgccgctgcagctgatcaaaaccgcgccgggcagctcgctggtctcctccgtgttcttcatgttgctgccggaacaggtttacgtttacggcgactgtgcgatcaacccggacccgaccgccgagcagctggcggaaatcgctattcagtccgctgaatccgcgattgccttcggcatcgaaccgcgcgtggcgatgctctcctactccaccggtacctccggcgcgggtagcgatgtcgagaaagtccgcgaagcgacccgtctggcgcaggaaaaacgtcctgacctgatgatcgacggcccgctgcagtatgacgccgcggtgatggctgacgtagcgaagtccaaagcgccgaactcaccggtagctggccgcgcgaccgtgttcatcttcccggatctgaacaccggtaacaccacgtacaaagcggtacagcgctctgccgacctgatctccatcgggccgatgctgcagggtatgcgcaagccggtcaacgacctgtcccgtggcgcgctggtagacgatatcgtctataccatcgcactgaccgcgatccaatcggctcagcagcagaagtaatctgccgctgtggtcaaagcaaaaggcagccgaatggctgcctttttgtcgtcaggaggcgagcgacgattgctgccgcgcgtttgcgatctttattcgcgctcgctctcttccgcatcatcatactcattaccggcgttgcgggtcatccacagcgccagcgctttcagggagtccggcgtgaactcatcgcagcgggcggtgatctcttccggcgttaaccagcacacctcgctgacctcttcttcctgcagggcgaacggcccgtgggagacgcagctgaacaggcttccccagacgcggcagaatttgtcttcgtaataaaactggccgtgatcggcaaacggcaccccggcgatgcctaactcctcttccgcctcgcgacgggccgattccagcagctgctcatcagcctgcacgacgccgccagcggtggcatccagcatgcccggatgaaagtcttttgtctcggtgcgtcgctgcaccagaattttccccattccgtcatgaacgacgatataggtcgcccggtggcgcaggcactgcgcgcgcatttgctcgcggctggactgtgctatcacctcattgttttcattaacaatatcgacccattctgtgcttgccaaatgattctgttccgccatcaggaaaccttactttaaatgcgctctcgcggcgcgtctttatgattgagggctaaattacgggtaaattgcaacctctgcaataacctgattatcattgagtgctaaaacctgcagccgcccctgatccagcagcccatagctggcggaatatccccctttcgggatactcactgagccgggattaaagaggtaaattgcgccgcgtttttccgcgaccggtatatgagtatggccatatgccaggacatcgccagcggccagcggcggcagattatccggactatagagatgcccgtgggtcagaaacaggcgatagcgttcgctaagcacctgctgccagggcgcggtgattggaaaacgaagcagcatctgatccacttcgctgtcgcagttgccgcgaacggcaacaatgcgttccgccacgctgttcaaccgctccgccacctcacccggcgcatacccctcaggcagcgcgttgcgcggaccgtgattgagcacatcgccgagtatgatcagccacctggcgccgctttgcgcgaaccgttcaagcacgcgttccgtggcgggcagcgaaccatgaatatcggaggcaaacatcagcttcataggttccatctccactggttacgatgcctctatgatagcggaagcgcggcgggttatcagcctcagcgtttggcggaaagcgccacgtaacgctggattgaggcccgctgccactggaaagacgcataatcagccagcgcctccggtaccttatcgccattgagaaccaggcgattgagcatcagcgccaggtctgcgtcggcaatagaccattcgccaaataaattttgcccgccgtgggccagtagcgtggtggcggtggcaaacagcttttccgcagattgcctgccggcctcgctgaggtccggcattttcgccccgtcaaacaccacggcggtggatcgctcttcacgaattggcatcagatcgctgcgcagccaggcctggatctgccgggcgcgggctcgtttttgcagatcatgcgggtagatgcgctcccactccggcggcgcgaaacgctcatccagatactcggtaatcgccgaagactcacttagcgcgaaatcatcaacctccagcagcggtacgcgacgggtggcggcatagcctgtccagcccgcctgcagatgttcgccgcggttcaggtcgacggttttaagggtaaaaggcaggcttttttcctgcagagcgacatagacagacatcacgtacggtgagaaaaaatcggcatcggaccacagggtaatgacaggctggctcatagcttcctcaagggtggtagacaggacaataagccaacatagcctgtcttacaggcgatgtcactgctcgagcgcggacgacacgtcgcctggctgccgggtcgcttgcggaatttctcccgggtggcgcagcttcacctatactcgaacagtttgcgacccacgacggcgggaaatattatgatcgatctttactatgcacccaccccaaacggccacaaaatcaccctgttcctcgaagaggcggagctagcctatcggctaattcgggtcgatatcggcaaaggggaacaatttcatccgcagtttctggcgatttcgccgaataataaagttccggctatcgtcgaccacatgcctgctgacggcggggcgccgttgagcgttttcgagtcaggcgccatcctgctctatctggcggaaaaaagcggtaagctgctgagcggcgagctgcgggaacgctacgtcacgctgcagtggctgttctggcaggtcggcgggctggggccgatgctggggcaaaatcaacatttttcccacaccgcgccgcaaaccgtgccctacgctattgaacgttttcaggtggaaacccaacgactgtatggggtgctaaatcagcgcctgggatgcagcccgtggcttggcggcgaccactacagtatcgccgacatcgccgcctggccctgggtgaactgccatgtccgacagcgtatcgatctggcgaactatccggcggtgcacaactggtatgagcgcattaagcagcggccggcaacggcggaagcgatgttaaaaattcagctttattaaccccctgctcgcccgtcgcgctttgttgtatgattgcaggacttacaccacggaggaagcctgcaatgtctcaaccagacgccattattcgtattaagaacctgcgcctgcggacttttattggtattaaagaggaagagatcgccaaccgccaggacgtggtagtgaatgtagctattcactaccctgccgataaagcgcgcgacagcgaggacatcaatgatgcgctgaactaccgcaccattaccaagcgtataatcagccatcttgagaatggccgtttctcgctgctggaaaaattaactcaggatgtgctgaatatcgcatgcgaacatcactgggtcacatatgctgaagtggagattgataaacttcatgcgctgcgctatgccgactcggtgtccatgaccatgagctggcgtcgctaaccatgtcagggaggtggtatgaagatcctgcttactggtggtaccggcctgattggccgacatctgatacccagattgctggagctcgggcatagcgtcacggtctccacgcgacatccggataccgcccgcgcccgtctcgatccgcgcgtcaccctgtggcgcgatttcgagggccatcaccacctcaatgacattgatgccgtcatcaatctggcgggtgaacccatcgctgataaacgctggacggccgagcagaaacaacgcttgtgccatagccgctgggatctcacgcagcggctggtgggcctgatccacgccagcgacacccctccctccgtgctgatcagcgggtctgccatcggctactatggcgacctcggcgaggtggtggtgaccgaagaagagccaccgcacaatgagtttacccataagctgtgcgcccgctgggagcaaattgcctgcgaagcgcaaagcgagcgcacccgcgtctgcctgctgcgcaccggcgtggtactggctccgcggggcggtattctcggcaaaatgacacccgcctttaagctcggcctcggcgggcctatcggcaacggcagacagtacctggcctggatccatatcgacgatatggttaacggcattctgtggctgctggataacgatctgcgcggtccgttcaatatggtttctccctacccggtgcataacgagcagttcgcccatgcgctgggtcatgcgctccatcgaccggcgattttccgcgttcccgccgccgctatccgcctgttgatgggggaatccgccgtcctggtgctcggcggccagcgcgcgctgccaaagcgtctggaggccgccggcttcgccttccgctggtacgatctggacgaagcgctaaaggatgtgctgagttaatggctgacacaggggagcattggctcccctgattccattctgctggctcatgctccacgcctggatggcctcacccggcgctgcagcatcgccatattcaggacaaccagcacccttaatcgcctgaattcaccgccagccggccggttcgccggtgttacctggcgaagcaaagtgctaaggtaggcttttctttctgcgtattgactgctttatgacgaccatcaccacaccacgcctttcgcttacccgctttgttaccgatgactggcccttttttctgcgcctgcgccaggatccgcaggtgatgcgttttatgggggaggtgttaagcgaggaggcgctgcgcagcgtcttcgtcagtcgctgtgccgatcccggggtgtttgtattgcgcgataaattcggcgaggcgctgggcgatattgggctccgcatcagtccgaaaaatccgcacgaagctgacgtcggctacgcgctgctgcctcaggctcagggaaaaggctatgccagcgaagcgctgcgggcggtctgcgagtatggtttcaccaccctgggggtgcaggccatcaatgcctgggtgctgggtgaaaaccgtggctcatcgcgcctgctggagaagcaaggctttgtgcgcacccaggtgctggagaaagcctatcatctgaacggcgtcgattacgatgactggatctatcggctggagcgggaagctcatccggcgtccacagacgccggatgagccgattatttcagcgaacctttcaaaaactgctgcaggcgcgggcttttcggcgcgccaaacagcgcatccggatgcccttcttcttcaattttaccctgatgcagaaaaatgacatgtgaagagacgtggcgggcaaagcccatttcatgggtcaccaccaccatggtttttccctcttccgccagctgctgcataatgcgtaacacttcgcccaccagttccggatccagcgcggaggtcggctcatcaaacagcagcacttccggttccatcgccagcgcgcgggcaatagagacacgctgctgctggccaccggaaagatgcaccggatacttcgcctgctgacgttcgtctatcccgaccttggccagatattttaccgcccgttcgcgcgcttcctgtttgcttaagcccagcacctgaatcggcgcttccatgacgttctccagcaccgtcatgtggctccacagattgaaatgctgaaacaccatggtcaaccgggtgcgcagcaggcgcaactggttcttgtcggccaccttcagctggccgtctttatcccgtaccagaccaatattttggccgctgacgacgatcgtgccttcgctcggtttttcaaggaagttaatacagcgcaaaaaggtactttttccggaacccgatgaaccgatgatgctgataacgtccccggctttcgcctgcagcgagacgcccttcagcacctcgtgttccccatagcgtttatgcagatcgataacgtttaatttattgtcggacatggcgttctcaatgcgtcgaagaaggtttgatatgctgcaaccagcgcttttccgctttacggaacaagctaatcagcacatacgagataattaaatagagcaccgcggcgatgccaaacgcggtgaacggctgataggtggccgagttgatatcgcgggcgattttcagcagatccggtaccgtagcggtaaacgccagcgcggtagagtgcagcatgaggatcacttcgttactgtaggccggtagcgcaatccgcagcgcggaaggcagaataatgcagcgatacagtttgaccgaagagaagccgtaggcccgggctgcttcaatttctccggcgggtactgagcggatcgcgccggcgaaaatttcagtggtataggcgcaagtattcagggttaacgccagtaccgtgcagtttagcccgctgcggaaaaaagcgttcaacagctccgtgcctttgacgatttccagggtatacatgccggagtaaaaaaccagcagctgcacatacaaaggcgtgccgcgaaatatgtaagtgaacagccagatggggaactggataaacttattgctcgagacgcggccgatggccagaaacaccgccaggatgcccccattaccactgaagagatcagcaaccataaggtaatcgccacaccggtaaagcgatagccgtcggtccacagtagtgatttccagtactcctgaataatttcaatcacaggtcagccctcttcacgccaacggtatagcggcgttcgagcagcagcagtacgccattagaaacggtggtaaacaccagataaatcaggccgcagacgatggcgaagtagaacggctgccaggtgcttttcccggccagctgcgtggctttgaccacatcctccagccccagcaacgagaccagcgccgtcgccttgaggataacctgccagttgttgcctatccccggcagcgcgtagcgcatcatcgccgggaagagaatacgccggaacgtctgcccgccgctaaagccaaaggcggtggccgcttcgatatgccccttcggcaccgcaaggtaggcgccgcggaaggtttccgtaaaataggcgccatagataaagccgagggtaataatcccggcgatcatcggatcgatatcaaactgggccatgcccagcgcatcggtaacgctgtttagcgcaatctgcaggccgtagaaaatcagcagcatcagcaccagatcgggcacgccgcggatcagagtggtatagccttcaaataccagcgccagtggacggttgctcgataactttgcgccagcgcccgccagcccaatcaggacggcgagaacgaccgagctgagcgcaagctccagggtgacgagcgcaccctgcaaaataacctgtgaaaacccatacagcatgctgcctaccctgtctgtcattcaccattgcgcgcgaaacgcacgcaatggcgaggcgtgagaattattcgccgtatacgttaaaatcgaaatattttttcgccagcttgtcgtaggtgccgtccttacgcatctctgcaaacgccttgttcagcgcttcacgcagttcgttgtcttccttacgcagccccataccggtgccaacaccaaacagtttctcgtctttgattgacgggccaccaaactggtaatctttaccaataggctgtttcaggaacccttcgctggccgcgacctcatcctggaacgcggcgtcgatccggccggcggtcaggtcggaatagatattgtcctgcccctgataggagacaatttcgatacctttcggcgcccagtgctcattgccataggtttcctgagtcgtcccctgcagcacgcccacgcgcttacccttgagggtggcgagatccggcgttaccgggctgccctttttcaccaccagacgcgaatctgccgcatacagcttgtcagtgaaggcaatttcctgctggcgcttttcagtaatcgacagcgaagacataatcgcgtcgattttcttcgcttttaaggaggggatcagcgcatccagcgggttttcaacaaaggtacattgcgtattaatacgcttacacagctcttttgccagatcgatatcaaaaccgaccaattctccctgcgcattcttcgattcgaagggagcataagtcggatcggtaccgatacgaattttttgcgggatggctgcaaagaccgtggaaacgctggaaagggccagcgctaaagagagagacaacgccagttttttcataactatcctcgacagactgtcattctaacgggtttattagaactatttacgccagttatcgtgccattattcgccccttaagggcaaagatttatgcaccagaaaggccgattttttgcatcagaaacgcttaactatgcattttttagccaaaaaactggctgcttttgcactgaaatgatccacagcgcgtttagatgcacccttttggggcatggatacgaacctggcggcaggcccaccccattgtgcgggcctgcagcagtcttagtcgccgtacacgttaaaatcgaagtatttcttcgccattttgtcgtaggtgccgtctttacgcatctcgcccagcgctttatcaaacgcggctttcagctcggcgtcgtccttacgcaggccgataccggtgccgtcgccaaagtactttttgtctttaacggacgggccggcgaaggcgaaatctttcccggcaggctgtttcaggaagccttcgctggcggcgacttcatcctgcagcgccgcatccagacggccagctgcgaggtctgaatagatcagatcctggttctggtaagccaccacgtcaacgccctggctgcgccagcggtcgttagcataggcttcctgagtagaaccctgcagcacgccgacgtgcttgcctttcagcgcctccagcgtcggctggatcggcgaccctttggcggcgatcagacgcgagtcagcggcatatagcttgtcagagaaggcgatctcttgctggcgcttctcggtaatagagagggaagagatgatggcgtcgattttcttcgctttgagggaggggatcagggagtcaaaatcactgccgacccaggtacatttcaccttaattcgggagcacaactcattgcctaaatcgatatcaaaaccaacaaagtcccctttcgcgtctttcgacgaaaatggcgcataggtcgcgtcagtgccaatgcgaatgctctgcggcagagcagcaaacacgctggccgtgctgctcattcccacgagtaaagagagagccagaatcgtcttcttcatacagtacccttaagtgtcgtgtcgtgatgtggtgcgttgcttgttatggtgattgccgatcaatcctgcagtttttgtgccatcttcccggtgcgtgccgggaacagggttaaatttgttaaaataaagttgcaggattgtcttaaaagggaagataccagcattactggcgaaaccgcagcgcctgagcgcaaaaagacgaaataaatgtcgaggatttgatcgcggcaacaaatttgcaccaccggagcgcaagcgtacatttcatgcaccactatagtgcgacgctaggccccctgccagcgggtaaacaagtcgtgctccagattaatatcaaattgatcgagtacccgattgacggtctggttgatgacatcgtccaggctttgtggccggtggtaaaaagccggtaccggcggcattatcaccgcccccagctctgcagcctgaaccagcagacgcagatggcccaaatggaacggagtttcccgcacgcagagcaccagcggacgacgctctttcagcacgacatccgccgcccgggtcagcaggccatccgtatagctatggacaatgcccgagagcgtcttcattgagcagggtaaaatcaccatcccggcggttttaaacgaaccggaagagatactggcggcgatatcgcgggcgtcatgcaccacatcggctagcgcctgcacctcacgtacggagtagtcggtctccatggccaacgtctggcgcgccgcctggctgaggatgagatgagtttcaatatccggcacatctcttagcacctgcagcatccgcacgccgtaaatggcgccgctggcgccggaaatgccaataatcagtcgtttcacgttctgttaccccttgcgcgtgtgccgcagactttgccggattatagcctctggcgcaactattgacgcacagttgaggggcgaaaaaaagcccgccgtcctttcggtacggcaggcccgcgacgcgtgaacggcttaaccctcgttgtgcatctcgaggttttcgacttcgttctgcaactggaccgctttggcatcatcgttacgcagggagtcaagatagtcgaggtactgctggtcgacatcccgggtcacatatacgccgttgaacaccgagcattcaaactgctgaatatccgggttctccgcgcgcaccgcgtcgatcagatcgttgagatcctggaaaatcaggccgtcggcgccaatgatctggcggatctcatccacttcgcggccatgggcgatcagttcgttggcggtcggcatatcgataccgtacacgttcgggaaacgaatttccggcgcagcggaggcgagatacacttttttcgcccctgcttcacgcgccatctcaatgatctgctccgaggtggtgccgcgtacaatggaatcatcgaccagcagcacgttcttatcgcggaattccgcacggttggcgttgagcttacggcgaacagatttacgacgcagctgctgaccgggcatgataaacgtccggccgacgtagcggttcttcacgaagccctgacgataaggtttgtcgagaatgcgggcgatttccagcgcgatgtcgcaggaggtctccgggatcggaataacgacgtcaatatccagatcttcccactcgcgggcaatcttttcgcccagcttagtccccatgttgacgcgggcgctgtagacggaaattttgtcaataaacgagtccggacgggcaaaatagacgtactcgaacaggcacgggttgctgaccggattatcggcacactgacgggtatagagctggcctttctcggtaatatagaccgcttcgcccggcgccacatcgcgcaggaattcaaaaccaagcgtatcaagggccacgctctccgaggccaccatatactcggtgcgaccgtcgccaacgtcacgtttacccagcaccagcggacgaatgccgttagggtcgcggaaggccaccatgccatgcccgatgatcatcgccacgcacgcgtacgcgccgcgaatcaggcggttggtcgccgcaatcgccgcgaagatgttgtccgcttccagcgggtagtgacggaagttatccagctcactggcgaaaatattgaggaggatttcggaatcagaggtggtattgatatggcggcgtttttcttcaaacagctttttacgcagctcgtgcgcattggtcaggttgccgttatgcgccaatgtgatgccatacggcgagttaacgtaaaacggctgcgcctcggaggcgctggagctgcccgccgtaggataacgcacgtggccaatacccatattgccctgcatacgctgcatgtggcgggcctcgaatacgtcgcttaccagcccgttagccttacgcaaccggaagcagttgttggcatcaatggtgatgatgccagcggcatcctgtccacggtgctggagcaccgttagcgcatcataaatcgactggttaaccggcataacaccggcgataccgacaataccgcacatacgtcttttcctcgttcagcaacgacccaaagtctatactttaggcaagaaacttgacgagctttgcaggtattcaaaaaaccatctgatgacgggggtaaaatagggaataaactgcgactgatgccagtcatcgctcttcgccatcccggtaaaggtgtccaggaagaacaggatagcggcgatgatcagcaccccacgtagcgcgccgaagcagatccccaataccctgtcggttcctgacaaaccggtcttctccaccagctggcctatcacatagttcacgatagcgccaacgatgagcgtcacgataaacagcgccgcaatagcaatcccatttcgaacccgttcatcctcaaagcccgtaaaccagacagacaggtcagcgtagtaatggctggcgacataaaacgcgcaaccccacgtgactaacgataaagcttcgcgaacaaagccgcggatcaggctgaccaggcaagaaagacccagcaccgccataatggcgtaatcaatccagaccatatacgtcccacgatttacgccctgtcgtccagttcggggcgcattctaacagaaaaagaaaacgtttgcgtagggatttccatgccctacagaaataaaaatggcgctgaaaaaacattcaacgccagactgcctttcgcctcttcagggcggctgagacagggtttgcggggcgtttctccccgccacgttctctccgcatggcggaaaaaacaatcagttcggggtgaagcccatcaccaccccgctaagcccggagatctgctgcagatcgcccagctggcctttcagcttgtcttttgacgcatccgggccgacgaggatacgggtaattttaccctgtaccggcgtcgaaggcgacgtatagactttgaaacccgaggcccgcagtttaccgacaatctcattcaccttatcggcgttcttcaacgcgcccagctgaaccacataggctttgccggtcggcgccggcagggccgcctgctgctgcggtggctgttgctgctgtggcttagccggcggcggcgttggcgtcgaggcctgctgttgcggctgcggtttcggctgcggcttgggctgcggtttcgcggccaccaccggctcctgaacgtcatcgaagctgttgctgttcaccggaatacgcgatggatctaacgatggcgcggcggcatcgcccgcccgcacctcttccgccgccccttccggcggttgcgaaggcaacgcctgggttgccgccggcaacatatccggttcatcgcgatcgcctggtttcggtaccagcgggatcgcggcaaactcatcctggtaatgctttttctgcccgtccagcagccctggcaggataatcacccccagcgccaccagcacgattgtcccgactaaacggttctgaaacttactcgccaccgattctccccgcgtctatctcttccataacctgcgctacggtgtgaaacgaaccacacaccagcacggtatcttccactttagcgtcagccatggccgcacgccacgcctgcgccacgctgctatagactgtaccgcagcgcaaatgttccaccagctgctccgccgtcgcgccgcgcgggccttccagcggcgcgcagtaccaggcatcgacttccggggccaaattggccaacgtgccggcgatatccttatcatgcagcataccaataaccgccagcacgcgtcccgttttcgctaacgttttgagacgcccggcgagataggccgccgcgtgcgggttgtgcgccacatcgaggatcactcgcggggcatcgctgattatctgaaagcgtcctgggagcatcgcatcgcggatccctgcgcgcaggatagcgtcatccacggcaagcccgctggcgcgcagcgccgccacggccgtcgccgcattcggcaacggcacctgaggcagaggcaggtggcttatcgcccctgccgtatcgcggaaggaccacgtttcgccttccacctcatagcgccagtcgacgccgcggcgctggagcagcgcgcccttctcgctagccacttccgcgatggtgagcggcatatccggctcccccaccaccgccggtttaccggcgcgaaagatgcccgctttttcccggccgatactttcgcgatccggccccagccagtcggtatgatcgagggcgatgctggtgaccaccgcgacgtcggcatccacgatgttggtggcgtcgagacgcccgccgagcccgacctcaaggatcaccacatccagctgcgcctgcttaaacagccacagcgccgagagcgtgccgtattcaaaataggtcagcgagatgtcaccccgcgccgcttcgatttcagcaaacgaagccgtatgcgccgcctccggcagttcagccccctgaatgcgcacgcgttcggtgtagcgcaccagatgcggagagctgtagacccccactttataaccggccgccatcaggatggtttccagcgtgcggcaggtggtgcctttgccattggtgcccgcgacggtaaaaacgaacggcgccggtttaacgatatccatctgcccggcgacctcgctgacgcgcgccagcccaaggtcgatggttttactgtgcagatgttccagataagaaagccacgtagccaggggcgacgtggcctgaggaataggatctttttccatgatgcccgtaagaattgacggttaacgcgtatgaataaaaaagggcagcgccgccaggccctgccctctgctttatcaggcctcaggttcctgatccggtgccggcggcaccaccacgccttcatgaggcgcttccgaaacggcaaccggcgccggcaggttcatcagcttcgccagaatgctggccagcttgagacgcatttccggacggcgaacgatcatatcgatcgcccctttttcaatcaggaactcactgcgctggaatcccggcggcagcttctcgcgtacggtctgctcgataacgcgaggaccggcaaagccgatcagcgctttcggctcggcaatgttcagatcgcccagcatcgcaaagctcgccgatacgccgcccatggtcgggtcggtcagcacggagatgtacggcagtccgcgctcctgcattttcgccagcgccgcggaggttttcgccatctgcatcagcgacatcagcgcttcctgcatacgggcgccaccggaggcggaaaagcagatcagcgggcagttatcttccagcgcctgctccaccgcgcgcacaaagcgtgcgccgacgacggaacccatcgagccccccataaaggagaactcaaaggcggcggcaaccaccggcatcgcgtagagcgtacctttcattaccaccagcgcgtctttctcgcccgtctctttctgagcggacgccaggcggtctttgtatttttttgaatcgcggaacttcagcacatcttttggctcaagttcgctacccagttctaccagagaaccttcatccaacaggctatgcaggcgattacgcgccgacatgcgcatatggtgatcgcacttaggacaaacctccaggttgcgctccagctcggcgcggtagagtacctgactgcagctgtcgcacttggtccatacaccctcaggaatgctcgccttgcgggtgggagtgatgttgcttttaattcgttcaatccagctcattgataacctttctgcctgaacctggtcgatgccagttttgtcgtaaggggcgcataatgccatttttgcctcttacagaccatgaatgttgcacattaaatcatatcatcccggaacatgggataaaaaagtggtcaaaccgctgcgcgtgacgctctgcaccgtcacgcgcaacacaggctaaactacttcgcctgctttgacgccgcccgcttatggcggatgatctcaatcacacccggcaggacggagaggacgatgatcgccacgatcagcagcttcagattctcctgcaccaccggcaaatcgccaaacagatagccggcataggtgaacagcagcacccacagcagcgccccaaccacgttataggctgcaaaatgacgataggacatatgccccattcccgccacaaacggcgcgaaggttcggactatcggcacaaagcgcgccaggataatggttttcccgccgtgacgttcgtaaaagctgtgggttttatccagatagctgcgacggaatatctttgagttcggattgctgaacagcttttcgccgaacagccggccaatggtgtagttgaccgcatcgccgacgatggccgcgatgaccatcagcagtaccatcaggtggacattgagatcgttggttggcaaggccgagagcgcgcccgcgacgaacagcagggaatcgcccggcaggaatggcgtcaccaccagcccggtttcgcagaacagaatcaaaaacagaatggcataaacccagacgccatactgggcaaccagttcggcaaggtgcacatcaatatgcaggatgaaatcaattaaaaagtgaatcaagtccatgtttgtctttacccttaatgaccctattagtccgccagaaacagcgggcccattggcagcaccggtaaatcatagtgggccgggtaatccaccgacaccagatacaacccttccgcttttgccgttgccgcagcgagcgtcctgtcttttgctgccagcagttctgccatccagctctccggctggtttccggccccgacctccatcaggctgcctacaatattcctgaccatatgatgtacaaaggcattcgctttgatatccaccaccacatacgcgccgtagcgggtaacgttaatatgcatcacgttgcgccacggggtacgcgactggcactgtaccgcgcgaaacgaggtaaagtcattctctcccagcagacactgcgcggcgcgctgcatacgctcggcgtcgagcggctggtgaaaatgcgtcacgccatgacttaacaccgccggacgcaggcgatgattatagatgacgtagcgatagcggcgcgccgtggcgctgaaccgggcgtgaaaatccgccggtacatgtttgacccaacgcaccgcgatgtcaccaggtaaattcgcatttacccccagcgtccaggcggcatctttccgctgcgcccgggtttcgaaatgcaccacctggccggtgccatggacgccggcgtcggtgcggccggcgcaaaagacggtaatcggttcgttcgccacctgcgagagcgccttttccagcttctcctgcacgctgcgcacttcgttttgccgctgccagccgtaatatttgctgccgtcgtactcgatgcccagcgcgattttacagatcggctgttgctccatctcagacatcagtacaggtactcctcaatcagcttctcggcgatcttcaccgccatcagcgcgccgccgaagcgcacgttatccgctaccgaccagaactggatctgctccggcataccgtaatcgttatgcacgcagccgatggagaggcgggcattgccggaggcatcaccaacctgagtcgggaattcgccctcttcagaaagttcgatatcctcgccgcgggtaaaagcgtcgcgcgcctcctccgccgccagcgggcgcatcgcttcgaagctcaccatctgcgcatggccgtagaagaccggcgactgaacgacgctggcggagatcatcagcccgtcatcctggagaattttgcgcgcttcatcgacgatccggcgctcttcgcgcacgctaccttcacgatccggcagcagcggcagcatgttgaacgccagctggcgaccaaagaaatcgtcttcatcgataggaatgccgttcagcagcttagcgctctgacccgccagcgcatccaccgcttttttcccctgccccgaggcggagagcaggttagtgacgctaatgcgcgacaacccgccctgatcgatcagcggtttgagcgccgtcaacagctgactggtcaggctattaggcaccgcaatcaggttgcggttgcggtaatcgcctaatacgaacgggttcacgtccggcaccaccagcggtacgtccggctccagcgcaaacaggccgctgagatcgataaccagacacccggcgttggtcgcttcttcgacatacgctgcactggcttcgacgccggcggcgaagaaagccagctgggcctgggtccagtcaaattcggcggcgtctttgacgatcaccgacttgccaccaaaacgcagatgttcgcccgcgctgtcgttgcgcgccagagcaaaaatctctcctaccgggaactggcgttcagcaagagtttcgagcagggcttcgcctacggcgcccgttgcgcccagtacggcaatattccagccttcagacatggtggttaactccagaaataaagcggccccgccggagtatccggcaggggcattaagaagacattaacgaacaggatgatgcacggcgttaaaaccgagctggcgcaacagcgtcgccgcctgctcatcgctgcactgcacatacagcgaagaccattcgcgacgttcctgataatttttacgcagcttgtcgaattcaccggcgacgccggccaccttccgcagcggcgcatcatcgcggcgcacatcatacaccaagtggaccagtcttttcagcgtcggctgatcgagcggtccatgcagggtaatgcggccaaattccggcgccggcagcagagtgtccagcgctacctgctgcggatggccgataaaggcgctgtaggcttcaaaaacctgcgtcgtcccgcgcgctttcccttcgagggtgtagccggcgatatgcgcggtaccgatatccactcgcttgagaagctcaacgtttagatccggctccggctcccagacgtccaataccacactcagcggctgaccagcttccagccgctttagcagtgcggcgttatcgaccaccggcccgcggcaggcgttgatcaaaatcgttccaggcttcaggcggcttatcagcgcctcatccgccagatgcagggttttatattgcccttctttatacagcggcgtatggaaggtgatgacatcggcttcctggaccagcgcctcgagggagcggaagtcaccttcgtcgccgcgatcggcgcgcggtgggtcgcagagcagagttttgatccccaacgcttccaggcgcttttgcagtcgcccgccaacgttaccgacgccgacgatcccgacggtgcggtcgcgcagtgcaaagccgtcgcgttcagccagcatcagcagcgatgaaaaaacgtactctaccaccgcaatggcgttacagccgggcgccgcagagaaaccaatccccgcctgctgcagccacgcctgatcgacgtgatcggtgccggcggtagcggtgccgacgaacttaatggccttgccggcgagcaatgcttcattgacccgggtgaccgagcgcaccattagggcatccgcatcggtcagggcatcggccgggaccggacggcctgggatcgtctgcacgtcgcctaaacggctaaaaagctcacgggcatagggcatattttcatcaacgaggattttcacagttcagtacctgtctgagaacgagagttaactggggaagtgtgccataatctggccgccaggcatactcatcacctggttccagcaccgcgatatcgaaaggatgaatcatgacgcacccccttgctgatatgccagaccgtcctccagggcgaggcccatcaggcactgccgccaccggcgaaccttcgctttccatgcagcaacgcaccgttctggagcgactgatcacgcgcctggtggcgctgacctcgcagcagaacgcggaagtgtgggcctgcgtcaaacatgacctcggactgaaaggtgactcgcccctgctggcctgccatttcagcgccgcggaggccagtctcaaccagcgcttagccgccgctcaggataatcatcatcatcgccagaccttagcgcagctcagcgatctgctcggtcagggcaataaccgccaggcggtgagcgattatattcgtcagcattatgggcaaacggcgctgcatgcccttagccagacgcagctggagaacattctgcatctgctgcagcatggccagctgtcgatcccgcagccgcagcagcgcccgccgaccctgcgcccgctgttgccagccgagcataatacgctcaatcagctggtgactaagctggcggccgccaccggcgaaccaagcaagctgatttggcaatccatgctggagctttgcggcgtcaagtccggggagctgatcccggcgacgcacttcctgccgctttcgtactggctgcaggcgcggcaaacgctgagtgcgcaaagcgcgccgacgctcacctcgctgcagggagcgctcaagcagccgctggaggccgcggagtggcagaaaattgtcgactttgcccgtcgcagctggcaggtcacgccgcagaccacgctgagcccggcgcagatcctggcgctgctgaacaaggtgtttgtgctgcgggtggcccgcgcccaggagacgctggccatcccgcaggaggagccagtcgccaggcggacgtggagcgctaagccgtggcagctggcgctgggcgcggttgtcctgctccttgtgctgtggctcctgctgtagcccagcagccaccggcggcgtttacggctccccttcatgccaaacgccgcggtgtttcctacagcgttttcaggccggacaataacctagcggcgaaatgagataagggtgacgaggatccccagcgccgcgcagagggcgccggcaaggaacaccgacgagtagcccagcgaggtcgccagcaggccggtcagcggcccggtcaggccataggagatgtcctgaaaggccgcatagccgccgagcgcggtgccgcgcacctgcgccgggacgcgcttcactacttccacgccaagtgaggggaaaataagcgaacagccgcacccggtcagcgccgcaccggccagcgccagccaggcattcggcgccagtcccagcagcgtcagaccaaccgcctctatcagcagcgagaccatcgccaccttaacgccgccaaaccgatccggcatccagccgaacagcactcgcatcagcacaaaggcgccaccaaacgccgtcagggtaaagccggccattggccagctatggctggcgaaatagagggagacgaaggtgccgatcaccgcaaagccgacaccctgcaggcccaggccaatgcccgggcgccagatcatgccgatgacgctccagagtgaaggccgctcgcctccgtgggccgccactttgcgcacggtaccgttaataagccaggcgacgagcggtagtcccatggtgacacaggccagcaccgccacgccaaaatggctatagatcaataatcccagcggggcgcccaccgccagcgagccgtacatcgccatgccgttccatgacatcactttgccggaacgggccggacccaccaggcccatcccccagctcaggtttccggtcagcagctggctttcgccaaacccgaggatcaagcggcccagcagcagcaggccgagcctggcgagcaccggcagcggcagcagcgcagcggccagccatgccgcgcccgccagggcgcaggccagcatcccctgcaggacggaacgtttggcgccgtactggtctgccaggcgcccggcgtacccccgggtcagaacggtggcgaggaactggatccctaccgccacgccaaccacggtgttgccaaaccccagctcctgatggacaaagagcgggatcaccggcagcggcaaaccaacggtcatataggtcaaaaagacggcaaacgtaatacggaaaagcgaaaaattcgccgaagaattggatgttgtttcagtaactgcggacatgcattactccagattcgcagagtaaggcgagcaaaacgacacgccccctccacctgattatcagggttaaggcgcgttggttgacgttaaacgcttacgcattagtggagagactaatggatccgcgagcagtgtgcctgcgggctcttaccctgtcaagatgacaaaaaaggggagccggtggctcccctttgcgcatcacatgctgattaggcgttgtatttacgcatcaccagcgtggcgttggtgccgccgaagccgaagctgttggacattacggtggtcagcttagcgtccgtcggtttggtgacgatgttcaggccggcagcctgctcgtcgagctcttcaacgttgatgctcggcgcgataaagccgtgctccagcatcagcagggagtaaatggcttcctgtacgcccgccgcgcccagcgagtggccggtcatcgctttagttgccgaaatagccgggctgttgtcgccgaatacttcgcggatggcgcccagctctttcacgtcgccgaccggagtggaggtaccgtgggagttcagatagtcgatcggcgtatcaacgccatgcatcgccatctgcatgcagcgcactgcgccttcaccagacggggcgaccatgtccgcgccatcggaggtcgcgccatagccgacgatttcggcatagatgtgcgcgccacgcgccagggcgtgttccagctcttccaccacgaccataccgccgccgccggcgataacgaagccgtcacggttagcatcataggtacgggacgctttttccggggtgtcgttgtatttagtggaaagcgcgcccatggcgtcgaattcgcaggccatttcccagcacagctcttcgccgccgccggcaaagacgatgtcctgtttgcccagctggatctgctctaccgcgttaccaatacagtgggcggaagtggcgcaggccgagctgatggagtagttaacgccgtgaattttgaacggcgtagcgaggcaggcggaaacgccggaagccatcgctttggtgaccacatacgggcccacggctttcagaccacgcgggctacgcatggcatcggcgccgaagacctggaatttcggggaaccgccgccggagcctgcgatcaggccgacacgcgggttattctgatatgcttcaggcgccagacctgcgtcggcaacagcctgttccatggacaggtaagcatagatggaggcgtcgctcataaagcgcactactttgcggtcaatgaggccagtggtatccagtttgacgttgccccatacgtggctgcgcatccctgaatctttaagctcctgagagaaagtgatccctgaacgtccttcacgcagagatgccaggacttcctgctggttattaccgatgctggaaacgatgcccaagccagtaatcactgcacgtttcattaaatacctctgtaagtcgcactattttaagtttcgtgtcgcacaatagcgtacacttgtacgccgaacaagtccgatcagacattttgtgtataaatttgcgccctcaggcacacatcgttaagatcgtgctacgccttgtgattcgagtaacttacgtgaaacaaaacgccatacaacccgccaacctggaattcaacgctgagggtacacctgtttcccgagatttcgacgatgtttacttttccaatgacaacggtctggaagagactcgctacgtttttctcggcggaaatcgcctgccggagcgcttccccagccaccctcgcccgctgatgatcgtcgcggagagcggcttcggcaccgggctcaatttcctcaccctctggcaggcgtttgacgtttttgttcgtgataacccggacgttaccttgcaaaggttacatttcatcagttttgaaaaatatccgctgaaggctgaggatctccgcctggcgcaccagcgctggccagagctggctccgtgggcgcagcagctgcaggcgcaatggccgtcggccttcggcgggtgccatcgtctgctgctcgacggcgggcgggtgacgctcgatctgtggtttggcgatatcaatgagctgaccagggagctggatgattcgctgaaccagcaggtggacgcctggtttcttgacggctttgccccggcgaaaaatcccgacatgtggactcaggatctgttcagcgccatggcgcgcctggcgcgacccggcgggacgctggccacctttacctccgccggttttgtccgccgtggcctgcaggaggccggctttaccatgcgtaaaagcaaaggcttcggccgcaagcgggagatgctgaccggcgagatggcgcaaacgctgagctttcctgcgcgcgtcccctggttcgctcgcagtagcagcgatgcccgcgaggcggccatcatcggcggcgggatcgccagcgccctgctctccctggcgctgctgcgccgcggctggcaggtgaccctttactgcgccgatgaggctccagcgcagggcgcctccggcaatcgccagggcgcgctgtatccgctgttaagtcagcacgatccggcgctggcacgcttttttccggccgcctttaccttcgcccgccgaatgtatgacgcgctgccggtgatgttcgatcaccaatggtgcggtgttacccagctcggctgggatgagaaaagcgcgcataaaatcgcccagatgctggcgctgaatttacccccggacatcgcctgcgcggtgacggcggaacaggttgccgggctgaccggcgtcgataccggctgcggcggcatcacctatccggccggcggctggctgtgcccgcagcagctcaccgccgagctgctggcgctggcggccacacgcggactgcacgtgcactatggttatcccgtcgaaacgctcagcgcggagggcgatggctggctgctcaatcagcagcgctatcatcaggcggtggttctggcgaacggccaccgcatcactggttttgcgcaaaccgcccaactgccggtctacccggttggcggccaggtcagccatattcccaccaccccgcggcttgccgccctgcgccaggtgctgtgctacgacggctacctgacgccacagaatccgcaaaatcagcagcactgcattggcgccagctaccaccgcgggaaaaccgacaccaccttcagcgaagaagatcagcagcacaaccggcaacggctgatcgactgcttcccgggcgcggagtggccacaggacgtggatatcagcgccaacgacgctcgctgcggcgtgcgctgcgccacccgcgatcatctaccgatggtcggcaacgtgccggactacgcggcaacattgacgcaatacgccagcctccacgaacaaccggatatcgccgatagcgcgccggtctgtcgtaacctgtttatgcttggcgcgctcgggtcgcgcggactttgcaccgcgccgttaagcgctgagctgctggcggcgcaaatgagcgcggaaccgctgccgctggatagcgacaccctggcggcgctgaatccgaatcggctgtgggtgagaaaactgctgaagggaaaagcggtgaaataaaaccatgagggcaggcaatttcccgggtacggctgacgcctgacccgggctacaacatggctcaggcctgatttttcgcctgttgatacaggttatgccacatcccctgcaccagaatttggtccggcggcgacagttcgccagcgctgatggctttctccaggctctggctaactctgctgtgtaccgcgtcagcagaatgctcgccctcaccttccagctcagccaccgccagcgtcaggtggccgcgcagataaccgccggcaaacagttcatcatcactggcgtggtctaccatgttgtcaatcagcgccagaatgcgtgattcaaactccgcgatcatcatcttacctcttgtcatgtaatgtgcggccttagtgcaggtcttccggccacggaaagtgtttcgccgtcaatggcggcgtttgataatagtgttgtaacgcgcgaataaagcgcgccggacgttcggggatcccttgttcaagtaaagtcatcacccgagcatgcacccggcgctggaaggcgatgcgatcgggctcaacgtccccttccagattgtcacagctgacgttaaacggaaatcccgccgccacgcagaacagccactcaaaggcctgcggtttcacctcgacatcctcaaactggctttgggtcatcgcatcgcggccgtccgggcagtaccagtagccaaaatctacttgttcgcgacgcgccttgccggcgacacaccagtgagagatctcgtgcagggcgctggcaaaaaatccgtgcgcaaacacgatacggtgatagggcgtttcatcgtcagccggaaggtagatcggctcatcgtcgcctttaatcaggcgggtattaaattcttcggcaaagcagctgtcgaaaaggtctatcagctgctgataatggtgttgctgttgcattaatgaattcccaaccactgcaaaatctcagccccgtggctgtcataaagaagtttcgcgctcatcaccgccgagacgataacgatcatcggccggatcagcgactgccctttactgagcaccagccgggacccggcacgggcgccaataaactggccggccatcatcacaaagccggtggcccagataacctttccaccgatgataaacagcagcaggccgccgacgtttgaggtggcgttcagcagcttggcatgggccgtcgacttggcaaggttaaacccggccagagtgacaaaagccagggcgtaaaacgaaccggcgccggggccgaaaaagccatcgtaaaaccctacgctaccgccggcgaccagcgcaaacggcagaccgtaaagccgacgctgccggtcggcttcgcccagtttcggcatcagcaggaaataaaggccgatgccaatcaccagcaacggcaggatctgcttaagaatatcggattgcacgtgctgtaccagcagcgctccggcggttgagccgataaaggtcatcagaatattcagcttctgatcggccagattaaccaccttgcggcggacaaaatagagggtcgccgatagcgacccgccgcaggcctgcagcttattggtcgccagcgcctgggctggcggcatgccggccgccatcagcgcagggacagtcaataagcccccgcctcccgccagtgagtcaataaaaccggccaggatggcgacaaagaagagtaccaccagcaccagcggcgatacggcaaacaactcgataaaactatccattacagcacatgctcatccagtagcgcctggcaggaaggcggcagcggcggcggcgtcttcttcacaggggggtagacccgggtttaggtggttcgaaccagctctgcagctccgctccgcagccatcgccgggcggcggcggcgcctgatcctcgcactccagacttcccgccgggcaacgcagtcggacgtgcatatgagcgcgatgctggaaccagggacggactttacgcagccactggcggtcgctgcccgcgtccaggcacagctgctgtttaatcgccgggttgacgaagatgcgggtaacttcgctatcttccgccgccagcttgataagctggctgatttgcgggctccatagcgacggcaccacatgcttgccatcgctggcgaccaggtccagcgcctgcggcttcaacagctgggacgatgtccagcgcgtttgcggcagctgaaggaagatatcgacatcgaggcccgtctggtggctggcgtgcccgccgttaaagcgcccgcccgccggcatccccatgtcgccaatcagcacggttcccatacctttattgtgcacctgattactcaggcgctgaataaactgaaccagatccggatgaccgaagtagcgacgctgatcggtacgcatcacctgatagccgggggcactcagggggagcgcctcggcgccaacgatacagccattggaaaacgcgccgattgactgggcgctgccgccgatcggttgggttattttctgccatggcgtggcggccaggctaccggcgctggccaacagcgcaagcagtgcgataacggtgtttttcatggttaccagcgtggaattgtcgtcgtcacgtcgccattctgcgcgcgctgacgcataaagtgatccatcagaacgatcgccagcatcgcctcagcgatcggtacggcgcggatgccgacgcacggatcgtgacgccctttggtgatcatctccacttcttcgccaaagcgattaatcgtatgaccgggaacggtaatactggaggtaggcttcagcgcgatgttggcaacgatctgctggccgctgctgatgccgccaagaatgccgccggcgtggttgctctggaacccggctttggtgatttcatcgcggttttcgctgccgcgcagcttcaccacctcgaagccgtcgccaatttccacccctttcacggcgttgatgctcatcagcgcgtgggcgatatcggcatccaggcggtcgaagaccggctcaccgaggcctggcggtacgccgtcagccactaccgtcacttgcgcaccaatggagtcgccctcttttttcaggccgcgcatcagttcatccagggcgtcgattttatccgggtccggacagaagaaggggttctgctcaacctgttcccagtctttgatggccagcggaatatcgcccatctgcgtcaggcagccgcgaatgacgatgccgaacttcgcggcaaggtattttttggcaatcgccccggccgctacgcgcatcgcggtttcgcgcgcagaagaacgaccgccgccgcgatagtcgcgcagaccatacttttgctcgtaggtgtaatcggcgtggcccggacggaacagatctttgatcgcgccgtaatcctgcgaacgctgatcggtgttctcaatcagcagaccgatactggtcccggtggtaacgccttcgaagacgccggagaggattttgacctgatccggctcgcgacgctgcgtggtgtaacgcgaggtacccgggcgacgacgatcgaggtcgtgctgcaggtcggcttcggtcagcgggatgcccggcggcacgccgtcaacgatgcagcccagcgccagaccgtgcgattcgccgaaggtagtgacgcgaaagagttgtccaattgtatttcctgccatcacggctccaatctttttcgttatgttggcgtgttgtttttttagtctttataaataccgaagtgcgcacgggcgtcaatcagctgctgtttggtcagcataaagaccccgtcgccgccgttatcaaactcaagccaggtaaacggcacgtccggatactgctccatcagatgtaccatgctgttaccgacttcacaaatcagaatcccgtcgtcgctgagataatccggcgcgttgccgagtatacggcgcgttagcttcaggccgtcgcttccggaggccagccccagcaccggctcatgctcatactcttccggcagatcggccatgtcctcttcatcgacatacggcggattggtgacgatcagatcgtactgcagcttcggcagatcgcggaacaggtcggaacggatcggcgtcacgtgatggatcaggccgtgggactcaacgttgtgctcggcgacggccagcgcgtccggggagatatctaccgcatcgacttccgcctccgggaaggcataggcgcaggcgatggcgatgcagccgctaccggtgcacatatcaaggatgtgctgcggcttatggttaatcagtccggcaaactggttattgatcagttcgccaatcggggagcgcggcaccagcacccgctcatcaacgtaaaactcatggccgcagaaccacgctttgttggtcagataggcgacgggaatacgctcgttcacgcggcgaatcacccgctctacaatgcggtgtttctcgctggaggtcaggcgcgcagtgcgcatgtcttccgggatatccagcggcagatacagtgaaggcagcaccagctgtaccgcctcgtcccacgggttatcagtcccgtgaccgtaccagatattagcagcgctgaaacggcttaccgcccagcgcagcatgtcctgaatggtatgcagctcattgactgcctcatcaacaaaaattttatccacgacatcctccagggcacactctgctataaattcggcggctagtgtgccatgaagacggcgataaatcagcattcttgcgataaggggcgggggaaaaaacaggttttccttgcccgaagggatattgagtcgggtaaactagcgcaaagtatgaatgagagcggacaatgaaaaagaagacatcgcttagcgaggaggatcaggcgctgttccgtcagctgatgaccggcacgcggaagatcaaacaggacactattgttcaccgcccgcagcgcaagaaaattaccgaggttgctcctaagcgtttgctgcaggaacaggtcgataacagccactatttttccgatgagtttcaaccgctactgaataccgaaggctcgacgaaatatgtccgccccgacgtcagccatttcgagctgaaaaagctgcgccgtggagattattcgcctgagctgttcctcgatctgcatgggcttacccagcagcaggccaaacaggaactgggcgcgctaattgccgcctgccgccgcgagcatgtgttttgcgcctgcgtgatgcacgggcacgggaaacacatcctcaaacagcaaaccccgctgtggctggcgcaacatccgcatattatggcgtttcaccaggcaccaaaagagtacggcggtgacgccgcactgctgatattgattgaggtcgaggagtggcaaccgccggagctgccgtaacggcgggctccggggggccgtcagatggcgttggccatcttgaggttgcaggggcttttttgccagaggaactcacctttgccgtcggcatccagcgtcacgcaggcgatagccgaggtggtgaacatcgggggcgtttcccccggacacagctctgagaccagataccccaccagcggcaggtgggagacaaccagcgccgtcgccacgccttcattcgccagcgcctgcagataggcgctcaccattcccacatcaccgcacggcgtgagctccggcatcacgtcgacatgtttcggcaggttcatgcactccccaacaatatccagcgtctgttccgcacgcagatagggactgacaagaacgcgctcaatatccactttttgacctttcagccaggttgccatctgacgagactcatcacaaccgcatacggttaatggacgaaccgagtcactggctgcatcgagggcagcgtcgccgtgacgcataataaaaacttgcatattgcaccgcttttgttaaccagaagcaccgtagtttggcctgcgaagacaatacgcaggtgacccggtggccgggcattgtgcctgatccattccacgaatgaaacgctgttttttacctcaatggcgtaagtatagtcaatcattgtttacaaaacagccaatcaacagcgtcgtccgcagccggatttaccttctttgaccacaacttaggtcagccgttcatccgctggccaaaaggtggtcccctgttcggccatgcgtaataaagtgtcacagggtgtaaaacgtgggccgaactgggcggccaggcgctgcaggatcgcggcaacttcacccgcgccgatagtatccatataccggaacgggccgccaagaaatggcggaaaccctataccaaagacggcgccgatatcgccatcgcgcgcgctccggataatctgctcatcaaagcagcgcgccgcttcgttaagcatcatcatcacacagcgctccgccacctgctgcgcggaaagccgcgactgcgggcggccgatgccgagcagcggatagactgccgggtcgggccgttttttgcttttacgcccttttgtctcataaagatagaaaccacgattattttttctgcctttgcgatcgtccttcaaaatcgcgtcaatgatgtttgcaggcgggctaaaacgttctccaaacgcgctctccagcacggggataattttggtgccggtatcgatacccacctcatccagcagttgaatcggccccaccgggaaaccgaatttaaccaacgcgttatcaatgacttcaattggttcgccttccaccagcaggcgcatcgcttcattgatatacggcgcgaggatacggttcacatagaaccccgctttatctgcgacaacaatcggcgttttcccctgccgtttagccagctgcaccacggtggcgatagtctgcgggtcggttcccttgtgtgggatcacctcaaccagcggcattttttccaccggactgaaaaaatgcaggccgattacctgcccagggcggctggcgtgagcggcaatatcgccgattggcaacgatgaggtattcgacgcaaagatggtctgcggcccgccgtattgttccacttcgctgaccatccgctgtttgagagccaggtcttcaaataccgcctcgatcaccacatcgcgatgagcaaagccctgatagtcggtagtgccggagatcagcgccatctgacgatcgcgctccactgggcgtaatcgacgctggcgaacctgtttattcagcagatcccagctgtactttaaggcgtggttgatgccacgcggctggatatctttaatccgcaccggcagcccgcccttacaggcggtcacataggcgatccccccgcccattaagccaccgcccagtactgcaacgcttctcagcgaaccggggcccgcctcggcgccagggtcttttttcagatcggtactggcaaagaagatcgatcgcagcgcctgcgactgcgggctcatcgccagttcgccaaatgcgcgcgcctcttcagcgtatccgctgctgcagccatgggccagaccattctcgacgacctgcaagattcgcttcaccgccgggtaatttccctgcgttttgcgctgcgtttgtttaccgacaaactggaataacagatggcgccccaggggccctgccagtacgcgttcacgaacaggcacctcccggctggtcggtcgtcccttcagcgccaactccaccgccgcctgcagtaaaatcgcctgcggcaccacctcgtccaccagaccggccttcagcgcctgccgcggccgcagctgcttgccggtgagcatcatatccagcgcggtgctgaccccgatcagccgcggtaaacgctgcgtcccgccggaccccggcagcaggccaagctgtacctccggcaagccgagtcgggttttttcgtcatcgctacagatacggccatgacaggccagcgccagctccagaccgccgccaaggcaggcgccgtggatagcggcaatcaccgggatcgacaggccatggatctcagccataatctgctgtccctggcgcgccagcgcttccgcctcctgcgcgctgcggcagcgggcaatcatgttgatatcagcgccggcgataaagttatccgctttggcggagataaatactacgccgcgcactgacttatcgtcacgtaactggcgtatcaatccccgtacctgactgccaaattcggctttcagggtattcattttttcacccggggcatcaatggtgatcaccgcgattttgtccgcacggacctcaagcttaaaagcggaaacagtatccattattcagcctccacgatcatcgccgcacccagaccacctgccgcgcaggccgtcaccaaaccaaatcccccgccccgtcgccgcagctcatgcagcgtctgggtgatcatccgcgcgccggtggcggcgaaggggtgaccgtaggcgatagagccgccgaggacgttaaacttgctttcatctacctcaccggtggcctgcgagcggcccagcacctcgcgggcaaagcggtcgcttgccagacactggagattggccagcgtctgcgcggcgaaagcttcgtgcatatcgataagcgtgagatccgccagcgtcaggccagcgcgctccagcgccagcggcgtggaccacgcgggccccagcagcatatcctgccagacgtcgatggcggtaaaggcgtagctgcgcagatagcccagcggcctcagccccagctctttagcccgcgactcggtcatcaggatcaccgctgccgcgccgtccgtcagcggcgtactgttggcggcggtgacggtgccatgtttgcggtcaaaggccgggcgtaacttctgataatctgcgagcgttgaatttttacgaatattgttgtcctgctcgagcggttcgcggaaagggggagcataggcggtcatcacctctgcggacagtttaccctcttcccaggctttcgctgccagctggtgcgaacgatgcgccagggcatcctgttgctcgcgggagatcccccagcttttcgccatctgctcggcggtatcgcccatccgcaatccggttgaatattcagccaccgccggggggaccggcagcaggtcgcgtggccgcagacgggaaaacagcttcagcttttggctcagcgtgcgtgccttattggcatccactagcgtgcgggccagcgttttactgaccccaatgggcaggacagaggaggagtcggcgccgccggcaataccggcgcggatggtgccggccatcaggctttcagcgacgttcgccacggcctggaaactggtggcgcaggcgcggctgacgctataggcgtcggtatgtacgctcatgccggtacccagcacaatttcccgggcgatgttcggcgcttccggcatctgcaccacctggccaaagaccagttgctcgatgacttcggcaggaatgtcgctgcgcgccagcatctcgccaaccaccatttttcctaaatcaatggccggaacgccatgaaaagccgtagcctgacgagcaaatggcgtgcgtagccccgtgacaatggcaatgcgatcgccctgacgggtgataagcggtaatgcctgactcataacactcccctgttaaccaagacaaccaagtggtctgacctgataacattcttaactaattttttacattaagccaatcggagaagcgcaaaattgcgagccaaaacacagtgaaaagaaaaggaaacgccccttatcaggggcgtcgagggggaaggattaacgtaagcccagctggaagatcagggattctgcttcgcagctgaaaacaaaatcgatatccagctgcacaccgccgtcaacgtcagtgaaggttgggttaatttggcacggctcagattcgacattgcgggctttttcgcttaacgcggcgagcgtttgctcggcttcagcgcggttggcgaatacgcggctgtaggaggcggtgcagtcggtgttgtcaacaatcgtgccaacatccatacagcagcaaaccggggtttcatcagcgctacatttactcatcgtagatttcctctggagatgcaccttcggtgccagaaaaattatgtgtctattttacgccctgtccccggtaagcctccagccgagaatcgctctgccggcgttaagtgacagaaatcacacttaaaaatgatctaaaacaaaaatccccttctgtcccccttgctctctccgagatttttgccagctggatcgcgtttctgttatcacaattgaaaaacttcataaacatacttgcaacaaatcatctggtcagacctatactcagcgcactggtctgatttcttggttgtaccgcagaccctacactcccgcgcttctgttacggcatgtaacatagtttaaaaaaaaataactcaatgaggttatgggcatgagccagaaaacccgctttacccaatctgcccttgcagtggctgtcgcacttgtttccacccaggcctggtcagcaggcttccagctcaacgaattctctgcatcggggctgggtcgtgcctattccggtgaaggggcgatcgctgacgatgctggtaatgccagtcgtaacccggcattaattatgatgtttgaccgcccgaccatgtcggcgggcgccgtgtttgtcgacccgggcgttaatgtttcgggcacctctcccaccggcaagagcctgaaagcagacaatatcgccccgacggcgtgggtgcccaacttccactttgtcgcgccgattaacgaccaatttggttggggggcgtctatcacctctaactatggtctggcaacagagtataacgatgattatgcggccggcagcatgggcggtaaaaccgacctgaccaccgcgaacttcaacctgagcggcgcctaccgcctcgacagcaactggagcttcggcttaggctttgacgcggtctacgccaaggcgaagatcgagcgctatgcaggcgatctggggcagattgtcgcaggctctggcgcgctgccgccggcgctggcgggccaggtagcgaagatcccggccgacacgcagatcgcccatcttaatggcaacgcgtggggcttcggctggaacgccgggatcctctatgagctggataagaataaccgctacggtttaacctaccgttctgaggtcaagatcgacttcgacggtaactaccgcagcagcctgccggcggcctataaccagatcctcggcaacttcggcctgccggcgggcaccagcggccagacgaccaatggttcgctaacccttaacctgccggaaatgtgggagctgtccggctataaccgcgtggcgccgcagtgggcggtccactatagcctgacctacaccagctggagtcagttccaggagctgaaagccaccggcagcaacggccagacgctgttctataaagaggaaggcttcaaggacgcctatcgtcttgcgctggggaccacctattattatgacgataactggaccttccgtaccggtatcgccttcgatgacagcccggtgccggctaataaccgctctatctctattccggaccaggatcgcctgtggctgagcgcgggtaccacctacgcgttcaataaagatgcctcggttgacgtcggcgtttcatacatgcacgggcagcatgttgaaattaaggaaggcccgtataccttccgttccgaaggaaccgcctggctgtacggcgctaacttcaactaccgcttctgataagcagcgcgccacaaaaaagggtgaacattatgttcaccctttttttatcattcgccgatcactgtgaatcgatatccttcagctcatcctgaatagcctgagcattcgggttgtccgccggggtcagcttaccgccgttggcgataaagtcatgacgctggaagtaggcttcacgcatcagaatgtaagggtcggaagactggcgcagcaggccgtcggaatccagcagctgagcacgtgtctcaatcccttccaccgcccatttaccgatcgacatcggccaggtcagccaggagagcaccggatacaagccatcggccatatcgccgccttcgtcgcgcagggtaaagcttccatagaacggcaactgaacatacgggccatagccaacgccataatgcccaagcgtactgccgaaacgatgtggctcaacccgctgtagctgcggattcgccatcccggccacatcgataagcccacccataccgagaatggtgttcaggaagaagcgggtaaaatgcaccatacctttataggggtcgccctgcaggaagtagttcaccatcactgccggctcttccaggttactggtaaaattgcttaacccgttgcgcgccggctgtgggacgtagtcgcgccatgccaccgcgacggggcgaagcacgtaaggatcaaccacgttaaagttgaaattaaacatcgtgcggttaaacccttctaacgggtctgagcgcccctgcggccgatcgccagagctggaactggcacatcccaccagcaatgtggcgccaagcgcaagcgccgacaggcgataattcatagatgtctccctggtttttatggctatcgcgagttgccatccatgacggaaagacaacgcttccgcccgtaaagatgtgagcgattgtaacagcacgttgaacgatgtctatatcacccaagttgttgatttgatcttagcctgggaataacgaaatcgcggggctcctattctaccggagcgacaaaaatctgacgttaccatttttgcgatttcagagtatgcccagccagacggcagggaaagccgctacgctataactatacagattgatagcgagggccacgaaatggatgaactagacaataacaaattaaaggcagaggatgacgaaagagaagtggaaagtgaggaaaatcagcgtggtgaagagatcgaagtaaatgaagatcgccttccctcgcgggcgatggcgatccatgaacatattcgccaggaaggggaaaaagagatggagcgcgatgcgctggccctgctatggtcagcgattgcggccggcctgtcgatgggggcctccctgctggcgaagggaatttttcacgtcaaactggaggggatcccgggcggttttttgctggaaaacctcggctacaccttcggctttattatcgtaattatggcccgccagcagctgttcactgaaaatacggtcaccgccgttctgccagtgatgcataatcccaccctcggtaacgtcggtttgctgatgcggctatggtcggtggtgctggcgggcaatctcatcggtaccgcggtggccgcatgggccttcaattatatgcctatttttgatgagccaacccgtcaggcctttgtcagcatcgccgaagacgtaatgaaaaacagtccgacagagatgttcgccaatgcgattatttccggctggctggtcgccaccatggtctggatgtttcctgtcgccggcgccgccaaaatcgtggtgattattctcatgacctggcttatcgccctggcggataccacccatattgtggtgggctcggtcgagatcctttatctggtgtttaatggaaatctgccctggagcgactttatctggccgttcgccctgccgaccctggcgggaaatatctgtggcgggaccttcatcttcgcactgctgagccatgcgcagatccgtaacgatatgagcagcaagcgaaaagcggaagcccgcgcccaggcggcggagaaagggaaaaaggccgaccgggcataaaaaaagcgccctgagtggcgagggtttaagcagtcagacggtatggctcttactcaggcgggcaaaaaacgctatactcgtgccgccttgtccccttagttaaatggatataacgagcccctcctaagggctagttgcaggttcgattcctgcaggggacacttgttttgagttcgcagcaattcgtcatagtccgccgaatcccgccagtatcaagcctctcatgaaatctctgttcgcagtagttcgcctcagaccgttgacaaccgcgccttttggcgggtaaaaaacgagtaaaacaactttacccaccggaattttacccatgctcactgttaagcagatagaggcagccaagcctaaagacaaaccctaccgaatgctcgacagcaatggcctgtacctgtacgttccggtttctggcaaaaaggtgtggcagctgcgctataagatcgacggcaaagagaaggtgctgactgtgggcaaataccctctcatgtcattgcaggaagccagggataaagcgtggactgcaaggaaggatgtttctgtcggggtcgatccggttaaggccaaaaagttgtctgtgaaggacaattcattttcagctatttatcatgaatggtacgaccacaagcggcaggtttggtcagaaggatatgcggatgaactttctcgcatgttccgtgacgatattctgccaatgatcggatatctggaaatacaggacattgagccgatgcaaatactggaggtgatccggaggtttgaagagcgcggggcaatggagagggcaaataaagccagaagaagatgtggcgaggtattcaggtatgcgattgttacaggccgggccaaatataatccggcgcctgaccttgctgatgccatgaagggatatagaaagaaaaactaccctttccttcctgcagatcagataccagcattcaataacgcgctatctggcttttccggaagtattatttcgaaaattgccacacaggttttgcaatatacagcgctgcgcacaaaagagctccgttctatgcaatgggaaaacgtcgactttgaaaacaggatgataaccatcgacgaagaagtaatgaaggggcgccgcgttcatgtggttccgatgtcagatcaggtaataaatctcctgaatactctcaaaccgatcacaagccctgtttcctcttttgtgttcgccgggcggaatgataagaaaaagcccatcagcgagaatgccgtattattagttatccgacagattggctatgaggggctggcgagcgggcatggattccgccatcagttcagcacaataatgaatgagcatgggtggccagctgacgcgattgaaaaacaactcgcgcacactgccagcggttcaatccgtggaatttacaaccatgctcagtatctggataagcgcagggagatgatgcagtggtgggctgattacatcgatggtcgcgcaggcgagtaagccattacgcgaattcttccaggatcaggatgccatccgcgccatctcctgagatgccaaaatctgcgagcagctatccagcacgatgtcaggcgtattcctcgattataacgatcccattctgaccatctgcaccaggattcacaggcattgaagggccattggaacatccagatgccccgccgccatatccaccgccattgttcgctggattatttatggcaggaattgatccccctacgccaagttggctatttgccccgcgcgaggcgattgcatattcagttgaaatggctgatgcacattccgatcccggaccgcttatcccgacaatattccagccggtagggctgtttgagtttgtgttcgctactggctgaaatggaggattagccggccccgcagggaggcccgctttgcctcctggagcggaaatcagcgctccgacggagctagtccctccgtcctccccataaatggatgatgcagtaccacctttgccgccctgaccaatagtaatcattactgaggttaatgcggatacatcatacatcccctctgcgtatgcaccagcaccgccgccattgcttatcgaaacttgaccagaaccggtagccggtgcagcagagctaccaccgccgcctcccaaaattctaatcttccattttgttacaccaggagtttttgtaaatgatccggagctcgtaacgacgcgcggaaagccaataaggcgaccattaatcgtgccatctgacgacccgagatttaatagcgcctgctttacagcttcacttccttcatctgcaatttcagagaaattatttgatacttgcagacaggaaagtaaagaccccgcagtcatcatatttgccgcaatatcgtttgttgaccatactcgcggagtggtcccctcctgaccacgaattaccgtcattacatcaccagaaacagacgtgacgtgcatgatttcggaaattgttttcgtggctgcgtcggttatcgttaatttgaaataactttctcctgataccggcgatggaaataaagcccccgttcctgtcccaacggtaataacggtagcggacgcgctaatacccgcagcgagtacactctttgcgttattgttggctaatagcttcagtgccatatataccccagttaaataatcgaattatcagaacgaacatcgcagattgtgaacgtcacgacgccggcgacagtaacatcgtccagggcctcgccctcaattggatcaatgcaggattgacctattaatacatggagcagatatcaagtaagcgcagcaagaaggtcgttgaagtttgtgtaagaagttgatggcgtgtagtctgatggaacaaaatagcgacttacctttccgctgtaaggtgatgatacgtaaatcacatccccacctacccctggtgctgaccccaaacgcagaagtgtaggcgcggagtcaccaagtattgaatatacccatcctgtacctgcattttcagcaaggacgatgacagcgacagtactccctgaagaagtatattccaccgaaaagtaaacccgttttttgactccttgaaccgtcgccgccagagcagcagacgtattgccgatttcagggggaacatacgcgagttcttcttcgatccatgcagttccattccatatagaattttttaccctgaaatttgtaaatgcagttcctgtaggatcgtttatttctctaaacctgaaggttatgtgggacaaagattcaccagagaaagcaaacttcgctgactgaatccctataatcagtgcattactgatatttgggtcttctcctggataaagaggtttataagcaagctgaccctgcgttactggcatgtcaaaaacagttccagacacatttcgcataagcccatcattgcctataactccgtactctccaacatgacggaccgctgacgcttcatattttgcccattcgtagattaaatggactccagctgaattaacatgcatgtcgtcaggataaaccgccctctggtcctgctctgcaacatgtgcaaagcgactccacagcctgctcgtaatatcatactgataaagaaatgatgcgcgcttaatttctcctgtcagacttctatctgatgcgcgtaacattgcaaaaacattaccatcaggtgccctgccaacgatgggataagtacatgtccattcaacatcagggaaatcccttgttgcatcaaccatggtgcttacatcgcccgggagggagcttctgaagtagcgcaacaaattagtatgcattgatgtaaatacatgaatgtagccagcgccatccacgactacagagggctgattatgcccaacatcattaacatatgacgccacggtaccatcagtgtttttacacaaacctcttgtcagggtaccatccgcatcacgccttacaatttcgacctgatgataaccagccgtgccaaattctttgcacagcccatagtattcaaggccctgaaaactatcgacggggtgccaccaccccgcctgattgctttcagaggcctgatcagagattacagagatcgacagatcagccattcaccgttacccccagatacgcagctcttttaagaaggcgctcagcaaccagcatgatctctgtattgcttaatttgcgtggatataacgctacgccataccctgaccacgctgcaaatgcactgctggcattacttccaccaaggaatgtggatgaggtgcctgtattaacggcagtgctggcagtcgccgcggttaccgagtttcgcgtcgccatgccaaaaacatgtccagttaaatcgccttgtaaaaacacaacaaatgcgccgcttgccggcaacactatatctgacacgacgctccctgcagtcattgagcgcccgagttttttatctgcactggtagtaaggcggatatcccgatggcgcataataccagcgctaacaccaacatcgaccaaaccgatcatggtataagcatcaggtgaaaatgtgcctaaagtcaaacggctgtctactccggctgctgctgacacgcctacagatgaaaatgcagcgttacctgacaatgaaaaattaccgccagcactcccccagtttttgctacgtcttgactcagggatcgcagaactctcaaggtttccccataccagagggctggctaccggtggaatataattattagaatatgctgctgcgtccgtacctgctgccataattgcaacgcccatgaatatccccttactgtaagttgattgctctttcagccatgcgctgacgagaattaagataaacggtattaacatcctgcattgataatgcagaatcgaaataaataaactcagctacatcaagacctttagttttaaacatagatacatcacagtacgcattaccaatggcaatattcctgccagacaatataagtctgtcagtatcagcctctcttagcacctgataatactcgccgctaatactaataacctgatagcggtgaccagaacctgttagttttactacatgcgagataaatagccatttatctaccggagtctgatcgaatgggtagcgtctggaagtggctctgtatccggatgtttttgaacgaacccagcgacggtcgtctctgtcagaaaagagagagatctggtttccagtataggtatcgtcatcgtcacgaggcgaatacccattttgggtgccatatactaccacgcaatcactttgcggagattgaacaggaattctaactactgcacaaactgtatattcccctgcatcaggaatatctgtaactaaagcccctccccatgctgacagagatacatagtttttattaaattctggcgttgactgaggtgagaggattcttccgtgaacccttcccaccatagatgtgtcaggataaccaaaaagccagtgatcgacagagccggtttcaagaattgacggaactggctcgccaccacttccgccattatcctttcccacaaatgtgccatctaatttatacccaaatattacaaatccaaattggtcggttgtacattgcgcccagtctggtgcatcaaaaataagattatcacctaccctttgccttcctttgctgtctacaagaatcagctcgttaccgaattcgtcagggaaggaaagaagcgactctgaatctgtcagctcgttatttccggcaaccaaagtaaatctttctgacaaaacatctaccgcattaccaaaatcatcaaccagcatgaatcctggtcctgagtccatctgaactatcttaacctttctggtctcaaaactattttcggttacttttccgacctcataaccaaaataatcacataatgacaagagggatgaattttcaccttcgaaaataatggatgatctttccatgaattcagcgagcacagcctgaattaccatatcatacgaaggcattttccttccggttggctccagcgtcccgccattatttataacttcaatagccagtgcactatcatcaggactgcgataataggttgtgctcccttcggggatgttcgcaatatccgcctgcgccgccgccagcgtcatgtactgccggctgagagggatcaagttctgccgcgtttcctcgacaaccttatctccttccgccttaattccgtctacggtgtaatgctcacccccgaggcgatcggtgtatgtcaggtcggtactggtgacaaccttatccagcatggcgccggcataaactgcatcccggatatccgtgctcggaacagcgttatctgtgggagttggtaacggtacttctgccattgtgcatgtcgccctataaaaggcgcacgaagccctcagaagtgaatctgatggtgtgcgcgaaggttggttgttacgggtaaataatgtctgaatactcagatagcgaaagcgtctgagtatcgtcgccgtttggtttggcgctttctacgcgccagatggtggagttaagttctgtgtttgttgcgatgaaataccggctggcattctggactataacccggtcgtaaatattgaggtcgaaagcatcggccgcggactcaaaagcctttggattatcgtcaacaggatatgcccgccagcgcccacggtaattcccgagactgtcggtcatcaccacccacatctcaccgagtgagaagtcgaggcgctctgaggtcgaaaacacgtcaccggatcgcccggtgatatagcctgtttgctgggtgttgtcgtacatgtcaggacactgcacaaccgtaccgcgcacaacctgagtcgactccagcaccttcaccgtcatggtcagacgtgagtagagaatttttctcgcctcaagccaggcccggtctatcgcctgagtggcgtttcggcagccgtccaggctgatctgcatcgcattaaccgtggcgtcctcaacctcagtgattccgctgctgtctatctgcaggtagatgtacgcctttttgttcgtcagcgggtctacgtagtccagcgccacgccgtcgtaaccgcccggaagagacatttgccaggcgactttgtactcgtcccagaacatgtttgagcgcgcaaaaaccgcatcgggatttgtcactttctcatcacgccagaacgtcagcacatcgccgatattattgccatcaacgcgggctacattggcgatcgtcgctatgcgctcaccaagcggctgtttctcatccgagaaggtgtaatcgaaatacccaagcgcctcatcaggcagcgaatcggcaatggcatacagagcggcgacgtcaatactggctatgtcctgcttacctacgacaacccactcatgcaggatagcgtcagcaaacgaacgacttggccgcagcgtgtaatcaaccgcgccggttgtccggtcgtagctgatggtatgccgctgcgccagcatgttgtacttctgctcgcggtttgagttgctgtcgttcggccccttaatcgtgatgcgggcaattgtgtcctccggataaacgacgttttcccgtacgttaaccgcgtggatcgccatcagcgtcacgacgttggcgtcattgctgttatcgaggcgctcgatggtcaccgcatagcgccccgccccgacagccgggacgaacttgtgcgttgtgcggaaataccgggtcgtcacctggaagtcgttatcgaagaaataatcatgctgctcggatgtgcccggcacctgattgttgtcgtcatcgacctgccagaacttgatccgatattgcgttgtgccggccgtcgcgccgagctgaacaagcacatgcacccagacctgcgtcgagacgattggcgacactgacggaccgataacaaggggtgtctggtcattcagcgtgaacagagtcgagttgataaccgcattgcccggcagcgatgtaatttcacccgacagttcgccgatataaaacgtcgtgtacgacagcgtgtcgtcgccaataaagctctcagaggagataatattcccggcgccggtgacattccgcgtgacgcttgtgccgccatcgtaccaggtggcattgatgacgaatgacacgggatgcggcactgccagcgcagcgaagtaggcaaagttgtcatcgttcgacagcacgacagcctttagctgattactctcgatcgccaccgatgtcggcaccgtcgtggtcgctgtctgggccgggaagtcctggctttcattcaggcctggcacagtctcgttatcgacgtcatcgaactgatacccgacttcaatcgtgccgatcacgtctcccgggttataaatcgcagaacttgctcccgccaggctgccgagattcgattccgagtatcggatcgacgatatggtgtaccggccgtaaccgacctcaaaccattcagtaagctgtttgttgttgtcgacgaactcgaacagtgcttcctgaatcaggtcaggaaagacgcggcactggccgtaaatattcgggcgccccttgtagagtcgcgcgcggttcgtctggccggttaagtcgttgttgggggattcgcctgtcgccaccgataccgacgcactaggcttatttgacagtccgaacaccttcagcgcgccggagaggattttcgtgaccggacgcaatatcgtggtgatgagctttcccaccccgccttctggctggtcgaacacagccacagtatcaccggatcgcagtggccgactgatatcgtaatcgtctggcagcgctcggccattcagtttcacgataacatcgcggtgcagctgcagagaatccagcaggctcaccagtgtggtgccggcatctaccgttccccgctgcagcggagcgccaggcagcctctgtaactcatatcgcaccatgcaccatgtactccactttgctgtaaaccttcagtaatgccagcggactgtcgcagcgcacgaaaccgaattcgccgcgggcatgcaggcacttaaccgggctgatcatcacaccgatatgcgccggcacttcgccgcggtaaaaaacggcgatgcatccggtggccgccaccgacacacgccgccagtgggcgcgctcctgttcgtagcaggtgatgaaatccgcacccgattcgtagccggcaacgtgatgcagttccaggccgagcacatgccggtaatagagaaccaccaggccccagcagtccatctgctcaaaactgcaggcgcggttagcccagggcttgccgttaacaagcccgataaagtcgctctgtctcatacggtgattagcccgggatagtctttcgtggtgtaaatgatggagttggccagagtcagcgggttagtctttccggcggtcacagtgacgttgctggcatcggcggaaatgtcgttaacatacagcgtccagtctttcagggatgatgcatcaccgatcgcgttccactgctgatacaggcacttaatcggcgtcatacgcgccgccccgcgccagcttttcagtgtctgccggacatgctccgtcgcggcgacaaacgttatggtcatggatatgaccgccgttccgtcctgcgccggctcggtcacgctgaaccgcgcaggctcgaaggcatttccgccgaacgtcgccgggcgaaacaggttattgaccacccggtaataaccaaacgcagggtgataaaactccaccgtctgtttgatgtcgcttgccggccgccgctccttccactctctcaatgtcggcatcagtcggccctcggcataacttcggtgatcaggtaatccagccagtatccatagccaggctgggcctcaacaatccagtcgtcgtagtcctcggtaatgtcctcgataccgttactgatgaccgttgcggtccaggtgacaatgttgccgtttttgctggtctgcaccggcatatcgacgaaatgcagcgtctgctgctgaacgccctgcgtatcacccaggtcgatcggcatctggaaccaggcgcgcccgcggtcacagtatgtcggcgagcgcagccacgacttaaaccgctcggcctgggcaagcgtgaatatccactgcagcgtccaggttgctttcaggtccgtagtgatcggcgtgattatcaatggaccgactgccgtctgcgtcgtctgccaggctgtatcctgcgtcatgttctgatcggcgcgctggggaagcggcaggaacggagggtattgaactgttgccacgtttcctccgggcattaaaaaacccgccggagcgggtttggtttagtaagcgcagttacaagttaaaacaacttgttgatcaccgatgaaaagtcagggaagtcggctatagtcatgagcctaacgctatctttctcaaggattatgacgttaacttgcccgccaatataaactctttcagcacttggcattgcatcctgtattgccctttgttcaaacatcattgccttgataattcccaagatgtcttccccgtcagggactgagcactctggtttgtaaaaccaaccatgagttatttcctctgacctgaagcattctgaagatcggtaggcaaatctctttattcttcccgatgactgagatattccaacatgatagatggtgaccgtgcactcatcacctacgttgtattccttcttatactcctcccacatatcctttagtgtggatggagcatggtaatcaagattatccacgtctaataaaatcatgcggctgtttacaaattccgcccagcgggaatgaaatccacccattcctgtgccgcatataatcgtttttatagttggtagatatgtcgctttattggtaaggataaagggattcccttcggcatccacaccaagagtatccgtcgctacaaccgcgaattcatccgtagaaaagcaaatgaaagaagacatggcatttccttttatctcataattagaaggacccactggctttcatggaaagtccgaacctatccatcataccagatgtcatcggtccaccacggtcaagatcctttaagaacgcatcaaccgtcaccacattaccttcttgcactgcttgggctgcaaatgaatgttgcccgccagtggtctggtcgtagaattggatattgatctctattggcctcgttgactgaggtccagctgaaccgctgtcgccgttactctggctttggtattcactacccgtcgatgccttcttgatacgcggcgatccgcttgtcacatccttgttgctgaataccttcccaccatcacccggtatcatgaaaaggcctttgctggtctgcatgagttccggaaggtttccttcgcctacagggtaaacattaccaggtgataccgagccaccattcttacgtccgccactatagtttattccgcttatggcgctaactatctgcgtgccagcagacaatgcttgcgctatagcaggaatattggcgggccacgggatagccatggcattactgatagcggtctgaagattcaaggacgcctgtgcaatcgcaaaccctttactaatagcgaaaagcgcttgatatgccgcactcgacttccctgctgcttgacctatcgcatccgccagggagccagcaaaattcgacgattctcctaaaagcgaactgacattctgctgataggtctgttgctcctgcagaaggatggcctgacgttggtaagaggcctgctgcatgattgcagttttagcgtcctcgtacagtttggtgttttgcttatcaatttcctggtacttagctagggcgtcaagtttttgttgctcctgcaaattaatctgtgccagtggatcaactgcctgtccagttgaaggatcaacagtagtttgcgcggaagctatctcctgcttggcgtacttctgtccctgctcagcctctttgcgcttctggatggatatagccgctcgctcgtttgcttctcctaacgccctcgcctcttcaagttgcttttgagttgccccactccctagtgactgttcggcgcgcaatccagcctcctgaatgcggcgcttctcaactgactcagtagataggttctgtacggcacgcaacttgtccagtttttgcgctactgattctgcagctgatgctgaacgcttatcttgctgctctcccttcctctgagcctcatgacgggcttcttctgctttctgaaggtcgtagttttctccagccagatcgccagcttttgatatctggtttgggttgtcagtaaccttcgccgcctgcatcctggcttttgtcactgctctttggcgttcatcctgaattttcagtaactcgttctgctcttcgaggttaagaattactttgtcgccatcagcggtaggaggagaaacctgcagcgctttggggttgaagttttgtccagcctgatttgctcggtttatttcatcagcagtgttgccgaaagccttcgcaaccgcgctctgcacctgctcaagtgaccaacccttttggatcagcccatcatgcacacccattgaagtgagcatgttgtttgttaatgttctgttggcttcagctgcagtttcctgagtttgcgccaacttatcttgagcgttggcaagatcccttgatttcttggctaactggtcagaaacctcagcctgctgacgggcaaaatcagcaccttggcccaatgattcagctacagcttgagcttctggggtgaaattacgatatctagaacttaaagagtcaacctctgcttgcagatcggaaatttcatctttctgcgctctaatagactcgttagcatcggcgatggtgcccctgagctgggtattattcatcgccttcattgaggcgtttactttgtccagactatcggcaaagcggagcgcctcctctctggcttgttgagctttctgccagaagtagaaaatggctgatgctgccagcatggctgcgccaccaggaccaccaatcaaagaaagcgctccacgagcaaggcctatacctaccgaggcagcacttgctgcagttgctgctcgtgcagatgccgcggcttgtgcagtttctgcctgcgccaaagacaatgatgctgcacttgctcttgatttagctgcaattaatgcatccagcgcaagcatttcagctgcgctacccttggccacattatattctgcctgcgctaaggcaagggaggacaaagccgcctctttgtctgcaaccgcctttctcttcactgacgtagcagctattaacgcagactgagcggcctgggcattggcagtggcctgacgctgggccgccaaagcagactggatctgagaggcagcagacattgtcaatgcgccgacatagcggcttcccataattgctgctgctgcagttaatgcagcgcccagaacgtctatgttttcacttgcagtcacaactgcatcattaaaaatagcggcgccagtttttacggtagagttttcgccaaagaatttagttacgttgttaccagcaacctgcagcgcctggctgatcgtcgtcgttgtattggcgaactctttcccgatcactgctccttgggatagaagcccattaacaaccacgtcggttgttaacttgccctgcgcagccatgttccgcatttcgccgatgctaactcccatggagtcagcgagagcgacaataagacggttaccctgttcgtttacagagttgaattcctcgccgcgcaaagctccagaagcaaggccctgcgacaactgaataatcgcgttctcggcctcttgcgccgttgcccctgatacaacaaacccttggtttatgattgtggttaacttcgccagatcatctgcgctggtcccgtactgcctggttgccctttccagtcttgcgtagagggatgccgttgcatctaaactactgcgagtttgctgagtaatgttgaatacgcgctctgttacatcagcaagttgctcgttaggccgcagtgagttagccagcttgttatttacagttgcccaggcatctgcatattcggaaatttgcttcgcagaaagagcagcggccaaagcaacggctacgcctgacaggctggacatagagcgctcagtgttattcacggcgcgcgtagtgctatcgaaaccacgttccatcagatcgaggcgttgattaacgcgctgttgcgctacaagcaagccctgcacgtccatttcaatatcgtaataaatgccgccagcgttctcagccatttgctatctccgggcaataaaaaaccccgccgaagcgaggtctttgttagaaccatgaatcagaaattgttggattcttttttatctttatatctctttacttctttatccagttcttcttttgacacaaactcataccgcacacttacatacccttttgacattgcatccattaaccgtcctggtgaaggttcaacgtttaaggtgattgtcatgccatctttctgatactttctttgccatgtgccgcacgactcatcttttatgcattcatagaaatctgccccatcacggcttaccttttctttaatttcaactgggctaccatatttttgctcaagcttctgagacatatcaccgtaaactttccttccttggttaaaaaagtacccattagcatctacaggagttgagaatgagacgcttgttaacccgagtccccccataaaaccaagaaaatatcgaccttcaaaagatgcaggttttggtgcggtgtcagcacttataaaaccgacaaaccctgtgttattgacttttgtgcctgcaagtttttgatctattgtctgttggatagtttgcccccatttgaatccaaacggggcatccggtttgttatcacaaccagttagcaaaaaaatagcagctaaaatgaacatataaaaacgacttaccatatccctatccccatcagtaaatgatgcggcaatcgtagcaaaccaaacatctttagtctgcccatccttccgcctttttctttttaaggagagcatccaggccggctgtgtccttctgcttcttgaggatcgtcgcgtattgcctgtaaccatgatgtccaggggcaaagaattgcccattatcgtacatgcctggatttttcttcatggcagacatagctaatggggcaagggtatctacagcaaggataatagttagcgcagtctttccatatcctttgtcgctctatcgacatcgatatcataaaacacgacagccacgccttttgcgctgagcgctccaatggcggcgcgcaaaaaacagcagcacatttttatttttgacgaaagggagttcgcttcaatgaccacgcctaacccacctttgaaaatcgagataccgtcagaaatggaagctgattttatcagcattcttgaacaaggtgacattgcctactcctatccggttgatgagtgcattactacgcattattttacggttaactccgctcaggacatcataattgagatagttaactctaaagctttatggggagctataggatatgcaatttgcaacctgatccaccgaaacaagcataaaaatctcaaaattgagctagatgacctgaagataagcgcatccggattcaagccagaagaccttaaaaacatcattgagctaattcaaaaaattcgcatcagcaaggattaagcccacctgagtgggctatttactcttggctgctgcacgctttcgtcggcgttcttctcgctgctcctcgcgctgcatatcgtcgaagaccttcatgatcgccttcatcatcatgaagttgacgaagtggtgattaacgcagccatgaatgcgtaactgctcggtgaactcttcagccgatcgcagcgcgtccatcatgttcttctcgcccttcatgaactccgagaagtcgcgccccgctctggaggcgcactcaacgattcggttattcatggtcacgccgccgcatacagcaacttcatttgccccttaacgggaaatgcagccatgcaacgggcctcgaagtccttctggtcaatgctgcaactggcgatgttggtaacggcgaccagttgctgctcgaccttctccagcgcatcaggcttaaggtgctggtgaatcttctctttgctgtcgcccgccgcctgttttgccgcctgatagacataatcaggaagcgcgacaccgtatacccaacgagcggtgatctggccgaacagcgccggacaaccgccgacatgaccgaagtaaggaagaccggacattttcgacagagcctggtagaacgggtctttaaagcgcttctcccacgacgttggttgctggcagaccatcaggccgacaatctgatcttcggtgagttggaagtttttactcagcagcagatttttaatgtgtcggtcacaggcgcgggcgaatttgactgacaaccagcgggcgaactccaccgctaactccggatgaagccaggtaccgccgtttcgccctttctccaccctgactaaaaggggagaaaaatcctcttttattccggagccagcaataccaagctcctccgccagttcggcgatataaattttcgtcgtctcggtctttagccagtcctttggaagcttgccgtgatgctttgcagcaactgtggcgttgaaccagcaatctgccgtaaaagggaatgaacggtcatcgtaattcatggggatgatattagacatatcggtattaccttttagtgatgaaccttgtctcacaggaatccggcccacagaaaggcaccgacagccagccggtatcctcaagggtcatcctgaaaggttctgtgtgaagtgcgcgtgagatgcgcggtgaaatttgggtataaaaaagccccgggctgtgccgaggctggtttatttggttttgctggcttgttcctgctgcatcatcgcctgccaccggcgatcatcttcttccatcactgtgtcaaactcctctcgggtaaaccctttctggttcgggtatttggcgtttagtagtaatgcaaattcggtcatcgtgaggttctcagcctcttcccggcttatgccgaaatggttgcgggccgccatgatgtagtcggctgcgcggaattctgcggttgtctcgttcgtttcgtaacgctgcagcttgcgcaccttcgctttgccgatgatgccgtgcatcatcaggttttgcgcgacgatgaccatacattccggcggcatgctacctggtcgccagacgaagccacgcttgcgtgatttccccggcttcatccatccaaccagatcgccgatatcatcgtcacagcaagctgtcagtatcgtatgcgctgccatgattgccttgcgtgacaggagcccgctttgcataaaccgcaggatgcaatcaggaaggcggctgtactcatcgcggatataggcctcagctgcgcgctgcgcgaatggcgtcgcctcgtcattgcacaggtcatagaacgcctgaacaatctcatcgggctctccgatgcgcgccatgttgcggaacgacggccggaaaaagaattcccggtcaccgaatcctataacgcattcgcctaattctttaataggggtcatagtcgctccataaacagtatcaagggcgcagaacgccctttgtactattcacgaaatggcctggtggttaactgatagtgaccgtgcaggatgcagacgtgatcttgactggtgtcgcggaagaatcggtgacttcacaggtataaaccccggcatcaccagaagcagcgctggccttgttgaaggtcgccgttgtttgcccgctgacaaccgtgccgtctttcttccagacgtaggtgtaaggcgaagtgccaccctcaaccgctacagacatagtcagagccgatccggccgtcacgctcttggtcgtcggcaggttggtggtgaaagccagcgccggcggagctacctcaaataccaccgtgtctgcatcagctactttccactctccggagaaggtggaaatatcagaggtgccgaaatcaccagaccaggaagtggtgttgaagtagcccatgatataagtgccagcgtcttcaccagtgaagtcgaagcggacccagactgtcggctgtcggccggcctgcacttcatcgaaaatatatttcgagatggcaatagcgccaacttccgtcgtcttgtctttcttacggaactcaccttctcctgagatggtgaagtccatattgttgaccaggttctcaaccagacctttcgtatcgtcagcctcagaggtgacggtattcatggaatagtcgaagcccttggtggtcatggcgccgaggcgcttccattcggaaagcgcaggaaccgtatcagcacagccaaaagccatgcggagcacggctaccttaccaatcagcttgccggtgtcattagcgcagccttgcatgtatgcctctcaattaaaaaaggccgccatatggcagcctgatgggtgattctggcgattattcgccgtatgtgcaggagacgagcagccgggttactaaccggccctcttcggtggggatcggcgccggtacattgccgacaagccgcagcgcgccaacgcaatcatcggcgccggattgcgcgctgatgtactcgaccatggcgtttaccgcggcgtcagcagcatcgggattggccttcgaggagatcacatcaaccataacataccagtcgccgccgaggtcaaaggtgatatcggtaccgccggaaggcctgaacacgatgaactgatcagtatctttcccagtgtcgcgccattgccgccactggaccttaaaccccgcggtaagcccctcagccacaaagaggtctttgaggcgcatatacatcggaggggtcatagcgaaagctccttcttcaccaccgcgtcaatctggctgcgggtatcctcgaagcccttcgttaagaactccttgcgggccgttgctcgcgtgaagttctgtttcactgccgggtcgtgaacatacaccgcatagttggcggagtaaccgacgcgcccggttaccctggtaccgttagccatgatttctctgaactggctgttgatgagcgtcgacgtatcgatcggggtgtaaagcgcggcctgcgcgctgccgataagcatcgcagactggattgctcgcacgactttacgcccctggacgtctttgatgatgcgatcgaggttggccttggcctggcggatgccgcgaactttagcgcccataatcagactcccgtaatcagtgcgaaatcgtccgccagtcgctcgaacgtatctgcgaactggacgatctgccgaatctcatcggcctcatccggcggtgctgcatcagtcgacgcgccaatcaggatgtaatctccctcccgcgccgttgcgtactcggtccatatcgtgtttttaacaacgagctcccggccaaggtcaccgatttttgcagagagtccgccctggtagtcgcagaggatagcgatcggcgcttcccacccgtacggctgacctccgccgtcggtatcgctaccgtcagcatcgcgtatgcgccgccagattgtcgccgtcgcggtgtatgaccaattcgcggttgccgacatcagtcatccctccatcgcagcacaacggcgcctgtggcgcgtatgcggtcgcagttgatgaaccactctccgtcgcttttcaagtacgccgtcgtttgctcgccggtatcggtgatcacccacacccgggtaaacgtccgcggcagcctttgctgaactgaaacccacgccatcagcagcccccgaccaccataaacaggcccacactgttgccggcgctgattggaagttcactggtgcagccgctggtatccagtttcgccagagagtcgcgcagccaggtgatgccatcgtcaccgtaatcgaacgagcgcgacgccccggacggcgccccctgcgattttattcgccgggcaccagaagacgtcgccatgagcgcagcggcatacatcaggatgagctttgccgtgcagtcgtcatatcccgcaccatcgaggcacgggatgatcttgttcaccacgcagagaatcggatcgagcagagcggccgggatggagtaacccaattcaccgaggaacgcctgcacgtctgccgctgtgattgggtcagccatgattatttcgccttcttcgatttgctggcagattcatcctgctgctctgcctgctctgcctgctctgcagcatcatcaacaggcgtagccacttccagcacctgatcttcatcactaatgatttcaaccagaccggcggccgcccaacgtttagcgacatcaccgcttaccgaaacctgcgcgccaacctccagcttctggagattggcaccggaaagtaggttgtctcgagccacttttaccagtgccataaatgccccttagctgtgcgcgtagataactgatttgcgattgttgatatcggtcttaaccatcaggcccatcgccccccaggtacgccagacgtagtcgctgttgtagaactgacgagggtccgcaacggtacccacggcctgacctacaatcggagcgataacgccggcggtaagcgggacaatcaggatctggttaccggtcagttgcgcatcttctttgatggcagcaataccggagagcttcaacagctccagcagaatggtgtctgactggtagttatcgctgaagtagcgctccaggttagtgatgatctgcccggaaacgtaccaggtctgctgcgcatactgcaggttggtcagcttcatcacgtcacgcagcgcgatggcagcgttgcgaatttgctccgccgttgcgctggcgctggtgaagtcgatattcaggccggaagcactgagatcgacaacctgtacgcgctcatcggctttaacgcccttccaggtcttgccatcaaaggcgatataattgccagcggaatcacggaagccattgaagacgtaatccacgtactgacgacgaacatcatcaacagaaccgcgctgagcgtcggccagagaagccagagcggagcctttgttgaaaatcgggtcacgccactggaatttgaatccagaatcatggatcggaaccatcgtaccgtcgaaggtgtacgcgcgcgcatccagcgccgcaccaatctgtccggacatagaggtgtgcgcccagccgcggccgccggtgcgagcgtactcgtacactgactcttcaagacggacagagcgggacaacgggatcagatcgttaagcagagtgaattcagtattcggttcgaattcagccagcacagtctgatcataagcgcgatacaggcggcggatgtcgtcgacagcgttcgtcgcgtccagcgccggagtgtttgccgcatcaccgcgccagcgggtgcgggatacgaaatcagcaacggcctgagcactcatattgcgcgccagttgcagctcattgaactgcgcctggttcgcttcgaggttgcccgtctcagtcgcgcgtcgggtggaaaatacaaacattcagtctctccttacttgaacacgacgcgaaccagatcgcctgctgtggcggtcagggacttgtcttcttcgacataggcaaagatggtttcaccctctgccagtgctttaatttggccattggccacagaaaccggctggcccttggtgtaggtaccagcggcagcgcgaacgttgaggaaaacgcccggcgttggctggatgtttaccacccagtcaccgatcgcataggcatcgtcaaccgttttgcagcgcaaatagtcgtagttagcaacgtaaagaattgcgtcttcagcgccatcaacagacggtgtaggcttggctgcactgaaaaagataacggtacccggcagaaacgctgcggccgcagaaccttcacgattaagttgcgggttggggaaaatcccgcccgcgtgaattacgtgtttcccgtctttagccattttttactccggcatttcgctgaaagaatcgttgttgttgaccggacggaatgcaccattcaggccggtagaggtctggcactgagcaaacaggccatcaagggcggcgccgtcaagcgcattcaccgccaggtcatccagcccgaatttcgcttttacggcagcgcgtttttcgcctttctctttgtcagcgttcacggcaaggcctgacttaacggctgccaaatcatcagcaaatggcttaaaccatgccggcgcttcttcgctgttgctggcctgctcttttttcttaggcttgccggtggcgggatcgatttcgtcgccgccatctttcttggctgccgccttctctgccgctagctggttgtaagcgtccatcagttcggcatcggacttgccttcagtcggcttacccgcggcttgcagcgcattgataatcagttctttcatcggatcgttctctccgttggttttaatctcgtactcaatgggtttgcgcacgacttctacaggttcgccgacaaacacggctttgccgtcgtcatcgatgaggtacttctgtttgaaatacttggcttcatcgcggtagatgaagctgtctggccacaccgtttctggccatagccacttatcttctgtgtcaccctcacgcaacttgtcgctgatagcgcgtgaaatgtcgtcaaaagagaagttggaggcgttggtgaagaagaatttggtcttgttgagcagaccttcgcgggtgcagtcgataccatcagcaaggcgagcaacttcgatctgctgctcatgaccttctgagttgacgaagatgcccacgccttcttccggagttccggcgccaggctcatcgagcagcaccgccacatggtcaaacatcatgttggtggcgatctcgttgtacttcttgcccttcgactcaccattagcggcaatgccggaatataggagtccggtagagatatggatgggttctgagttggtaccggagatcatctcatcaaggcgattaatcaggcgcttgcccttctcgcttgactcggcgtactggcggttaacgtacatatcacccgtcaccttcccaccttcgtggctgacgttctgcagccatgcgcctacgtgatattcattcaccgcccggacatcgcgagcagacacatgcttgccgtcaaccttcgggtggccaagcggcatcgggttacgctcaagcgtgttgtaggccttttcgatttctgctgccgggtacaacttccggttcatcacgatatcgtccacaacaggcgtgatgccgcgaaccacgatatgtggcttgccgtcgatggtttcagtggtgatgtttgaagcggagttgacgacggtcagcacgttaacgcgattgcgtttcatgctgggtcctcattggtggatttcaggcaataaaaaaggccgccgtggcgacctatttaatgtgtttaaactcccatcggaatgaactgtaaatgtattcaccgccctcttccctgtcggtcagtttggcagtaatttcgaactgactacctattgggtacaacttcaagtctgacaactttttggaacattcgacagccagtgatgggcttgcccattgtccaggtgttggcctgatatgaaccttcccttttctaccagaggtactggctgggtagtagctctcaacaatcaacttacgatacggctcatcaggttttgccataaaaacctccgcaaaacctccttgtatcatgcagcctctgccaatttccactgctctcgctctttcttcaatttctccgcgagaccttcgttaaaaatgctgccgtcgtcgttgagcagcactggaatctggctgcaatagcagttgtaccggttgccgttctcagcgtagaagtctcgcacctgctcggtggtgtagaccttgccgtgacggctggcgtgccagctgcgcgtggtcggcttgagtgccgacagccacagcaagccggtattcaaacctaaccggtcagcagcccagtccgtctcgttccattgcgcctgccgcagcgcgccgacctgctcagtctgagcaatggtcttggccttcgacatcgatacatcgaggcgcttgctgatgacgctggccgtctcgcgaggattcaccccgcgcgcgaccgcatcggtaatgatgttggtcagatcgccgcgggcggtgtcgctgatgaccttccagtcgctaaaagtagtcagcctggccgccgctatctggttcagataaccggggctgcttaaaagctgctgtagcgttgtctggctggcgtacacctgcgactgctgcgacaggttgttgaaggcctccagcgttccgcgctgcgcctctgcggcgacgtaatccatcgcccagaggttttgttcgccgccttccagcaggaaatcgtcgagaattacctgtaccgcttcgagcagatcagccaactcctgcgctgacatgtcatagatgaacttgccggcattgacctggtagagcctcacatcttcgccgtggtcgtggcacaggaagtgccagttgtggctgttaacctctcgctctctcccggtcaggcgctggtcgaagagcgatttcagagcgcgcttgatgccgagataccggtcctcgatatcccggaacattgcgctgacctgcttcgccgatcgcgtcgggtcaaccttactgcgtggcactactggcgtcccgactttcgccttttgctccggattcatcggaaagaggatcatcggtagttaccttttggtttgggtccggagttttcacttcttcgcgcggttcgagctcccccgcctccctgacctcattctcatcgacagcaggtgtgccgtaggcttgctgggtatccttcgcgactgcagccatttccttcatgttggcaatcttctctttctcacttggcgcgagcagatcagaccaggttaacgttatttctcctgacttaggcggatcgataacctctacagtccacagtctctcgatgaccgcggtaacacggtctgtctggaatccatttctcctcccgttacagcgtttggcaaaatcttttttgtcctcatcagaagcaagcctccctgtttgctgaccaaaaaggatggtgaaaggaatctgaactgaagaggaaaactggttcgctgacactgtccatgtagggctgggatcggcagcggcgacagaaaggactttagcctcaccatcctgggtaaccaaagccgaatcggttcccgagttaagcttctggatagcggcgtttagcgcctccgccagacctgaatatccagccttcttggcatcctccatgattttttcaatcttggtatctttcgacatgttgatgccgagctgcctgctggcatttttcaggaacccctcagcgctaccgccggaggttttcgccatgtcaagaaggtcgttatagcctgcacgcaagaaaggaatgccagccaaagaagattcatcttccgaaccttcgcaaaaaatgatgattcgttctgggtggatattgatagaacgcatcggcccgacaatatttccgttatccccaacaggttgctcctggaaataataaaacttcggcatggcgtagttaggagacttctgatcctgctctaattcccccggcttcacttgtgattcccatgcaggaatcatctttactaagccgcgctcacgcgaattacgcataacctcgcgatttactggttcagaccattcccggctatctgcaaactggaggatgagggctgagtagtgcccgacaaggtttcgtctatccgcgtccttcaccttagcccagtacttcttcatgagcttggtgactttcttttcccaaggcgtcgacttcttggacttcttcgtctcatcaccatcaactattacaggattatcagaccagcatgcatcgagcaatttatggacggcaccgaatgcggcgccattgcgctcatacatgttgtaaaagtgatcaaagtcgagacgctcaggatagccaaattcacaccacagatggtgccgcttggtattacctgatctattgaaaccagtcgcataaagctgtcgagatcgcgagacctcgttgaggctattcacaatcagcccagcgaggacttgcatttctgtatcgttactcactgagttgtccttatgtgaagaatatcgcccctgaacggcgaggagagtgcagcacgcggtaacgggttgcatcccaatcgtggtcttcctgctgggtatctacgtcatctgggtttttgctgtcgcgaactagcactggaatgcggctaatccagcctcggcaatgctcgaacacataaaaggcaggcttctccgggatgccagactccagctttttgccctcaacgacagcctcaagcatgtcagcgaataccgaggctccgttgactcgcgagccaggcttcttattggcctccagccattcgacgccctgattctccattttctggccgatcgataactcatcgtccccagtgttgaaaatggcgctatcagccgggcccgggataacttccgaacatattccaggaacaatgttcagttggccctgcgtgacaccgtcgatttgaatctcttcaggttcgttgacgtcttcaccaaccagccgcttgtcaatccacgccacgcctttcgcaacgttagtggatgaaatattcaggcccttgttgagctcgtcaggcgggcatccgtaccattcacctatcaggataagggaaccggcaggcgggcagaactgtcgaccatcaggtagttcggcggctgttccatcggtctgagcccaccagaggttagagaacggctttgactcaccccagtcatgagagcgatcgacggtccaactatccgggatgcggaatggcttaatgacgtgcagcgcttcattccacaggtggtcaaatctcccgccactagtcacatcccaggaaccctctacccacgctttgcgccggtttgggtctttgatggccatcagggtcgcgatgtactgcgggtcgaggtacgggttctctttaaacgatccgtggatagctacgcgggtaagcgtgatttcctcttctcgttctgtctgagggttgaacaccatttgccggtctcgctgcacggttccgcgcggcgctggctcaatgaagcgtttcttcacccaggtatgcccgatgccaaacgggttggtcgtgctgaacgtctccagcgggattggcctcagtaatttgccattctccagcgggtagttttccggcctgaacgatgagcgtcggcaggagaacatcatttcgtagaattcaggggactgctgtttcgtcagttcgttaaagccaatgaacgggaattcctgcccgtgataatcccagtagtcgtctgcctctttgccgaagcggaagagaagctcctcgcctgtgggccatacccatcgcaattcgctcgcagatgacagatatcgagcaccatcgttgaacagacgaaacatacgcttcgactgcgtgatgatgtcggcaaggttcttatattcggtatcgaagatgacgccacgccagaacgagccatagcccacgccaacattgcgccggaaccgggccaactgcgcagcagttttaccgggtccgcgagtaccttcgaaaagtatttcgttacaagggcaactcagagccagagactgtgatccaggcagtggcttccatacagctttgtaattcatccaccgagcacctcaccctgttgtttctgcgccgccgcttcccagtcatccacgttatcgctggttggtaccagcatgacgttatgcgtgacctctttcgtttcagccttattctcaatgctgtatgcctctcgttcgaggccgataagcgttttcaggctgtcgctcaggtctttcatggatttaacgcgggaaggaagactgattattttgtggtagagatcgttgagcttatccatgcctttgtcatcaggcgatcgcatcatctcgcccaggtcttcaagcgcggccacgttgccacactctccggccaattcatcgaatagcgtattggtcagttcgcgagcccgccggatgtctccccggtgctccatgcgtaccgttgcaataacctcggctgtcgcctctatcagtacgcgttcggtcaaagtgctttcgttgcgtaccgtcctgcgtacctcccgcttgcgtaccaagtcgtcagccttttgctgaatcttcgcattcaggtcgcgcgaccagtcgtcacgcttggcacgcttacggatagcgccttcgctgatgccgtgctgcgatgcgatttcacggagagacatcaccccggcccggtatgccgtctcgatggcctcccagtcgggtttgctcatactccattccttattttatctgctcggcactgctctcagggcagcgccattactgttttcattacacctagcggcgtgaatggatttatctcctataagagacaaaggctgttcagaaggaattagggcccactatagagaccttgtccaacgtgcggcggatttaatagtggcgagtatagatacatcaccgcgtaagagtttaatgttaccggagtaggaacagccacagggtgaaattaagttacacaatagaaatcagacttagcccaataatcaaaaaggagaataaatgttgaaaatcagtttgccgagcaaaataataaatcacccaatcacctatctcttcaccgcattcattctgagcgtggcccactactttttgaccggctctcctctatatttctaatccccgtcttatccagattgcactgccccagcgcagagtaaagcttcgcgtttaactccagactagcctgccacgtgaacggaacctccattccggggatcggtgtgtctgcagaactaaacatgggaaagccacccgtgggtggcctttgtgatggcttcgaagagtcaaaattaagtacggggaaacaataactccgccgcgcgctgtatttctcgcggagaaatatcatcaatatccgttgcaacaaggtatgactcttgcccaccgtgtgaagtcctgacgatagcagtcatgatatctatgtacacctcacgtccatcagaaagaagatgcctgactgatttaataccatcagcgacattgattgactgaggcttttgcccttcaagaatgagaatgacctgattcatttttttcccgcttgattagtacatggggaaacattatcacaggcattcaatgaatgccttatttcaaacactgcgtggtgatgtattcctgcagggctctcagggctgtttggtcgctgaggattccggaccggataccgagaacgtttcgtccagcaactgcagagagttcgacggtggcatcatcgcccatgctgggggtgccggtggtttgggttgcggctggcactggacacttgcctttgacgagcacccgaccaccattatcaagcttacgctgcagagcatcatttttagctttttcatcggctaattccttcgtgtatttggcatcgagcgccgcgacgtctcgctggcgggtctgcatgtcagcgatggtgtctttcgccaggctgagttgctcggttgctttgtcccgctgccttttgaattcggtcgcgttatcgtggtagtggctagccaaccatccgagactgactatcaggcagatcacaatggcgctcataatggcggttaaccggctcatttctgcccccacaaacaaacttcacgctcaatctcgcgacgagttaccaggcctttccactgcttgcccttggcgtaagtccagcggcgcagctgatcacatgcacctttctggtcgccctggttgattttgcgcagtagcgtggaggtttggaagttgccagcgccgacgttatacgcgaatgagtaaagcgccccgcgcattgtctcggggatctgcttctggatgtaagggttaatctggcgggcgacggtgttcaggtctttgctgagcagcgcacggcattcagcctcggtgtacttcttgccgagcatgatatctttgccagtgtggccataacagacagtccatacgcctaccacatcctgataggggtcataacgcacaccttcaagaccatcgttaccagttgggccggtgatgagcgcagaagcaatggctatggcgccaccgccgatggcagcgataacgctattcctcagttttggtgtcatagccattgagccgatcctcgcgttctttccgcctgtagtaccagttcaccccacaggtggtaatggtgcaggcgataccgacaataattgcccagtcactcagggtcatccccgctattttgtcggccaaaatccatacctctgccttaactgccccggcatacgcctttgctgagacaccgcagcccgtcagtgcggtcccggtgccgtatgaaagtctgctgtaaatggtgctcatttttgtcataacctcacctccgttgatgacggatggcgctgtgcgtaaaggggaaaagaggcccagaccctgcgggctgatttatcaacaaagcacgtcggggatgattcccgagggtctgggcatgctcaataaaaaacccgctcaaggcgggaagaaataccaagggtaaaaagtgacggcgcggtagccgtaatggtcccaaggtagagggattggagcatctggcggggatcgaacccgcatattctggttggaagccagacgtaattaccaaactacgacagatgcaatctggttcagggctctgcgcggaagggctttgacgtgtcgtgcagcacgtctctacccaagagccctgaccggatcgcaggcataaaaaagccccgcactattgcgaggctcggtgttctgataggtcaaacgcaaatacggcaacctacactaaatatattgctcatttgttcattgaaatgcaagcacgttatgactattttttgcaattttcctcacgctttcgcgatcgttaaacgcattttgcagcggctggtacaggcaaaagagtgccgcgttgataacctgcttaacttcccggcggatggttgaaatgcttgggtgcttatactggtttccggcgcgcgtcttcatcaggcgaggcttgctcacagcatgctgccatgaggcgatccttatctcgcttgagttacagacgtaataggcaaaaattaccttccatgcgttctcatctacgtttttcaggtaatgccggattacggcatcaatcagcaacccatcatcatcgctgcatacaggccttgatggtgcttgcggttcaaccgtggccatgaacttggcaatcatatttatcatcgccttgtctatcttccctgtctggcaccatgcgccccaaagctggagccactgatctatccactggtgctgttcgttggttaattccagtttcatgctgtctctcccaggcgcttatagatacggacgaaattgcgtaatattttgtagtcaaccagtacggtgccgcggctacgcaagaggcggagcttttgccaacggtcgcggatgcgttcgataacgtcacggctcatgcagcctcccgctgtttcagtgctttgagcttggcgcggtactcatcgcggatacgaataaagtcttcccggcggtagttggtcatttcgtggggtccgttaagccagtcgacatactcctgtccataacgagcaaccaggccaacttcatattgctgagcaaccgtcgcctctttggctgtgtacttccccgacccggcattgcacgatttgcactgcttatgagcgttgcgctcttcaaaacgcaactcagggtaagcgccgaccgttttgaagtggccgcagtcccactggccgccatgcagatcaggcgggttggtctcgccgcaactgatgcatggcaaaccagcatcacgagcgcggatgtaggcgttgaatgccttctgagcctgggctttgtagtaaccgttaggtctgagttcagccaatcttgctttacggcgctgacgcccctctttctcggattcgcgctggcgcttcaccgccctggccttcgccacttcccgggcttttgctgtctgttttttgccgatcgcgctggcgcattcaaaactgcataccacctgcccttcccgggcaggatggaaccattcgcggcagtgggcgcatttacgacgtgcaggtttacgcatgtggcctccttgctctcaggcgaagccacttcttatcgaccaggcgggcggtgtagtctttcagggtcgggatgtcggaaggcttaacttcgaccttgcgtttgcggcgtgccggtacgcggaagatgccgcgctccatgaccttagcgagcagactgtgcatgcgaagccctccattcctgggcccatgcaatccgactactggacttctcgctgaacttcacattgtgctcggtgccgaaccagtaaatcgcctcgataacctcgaccatatagcgcttgctggatttggaggtacgaacgccgaagtagacgcggccgccgttgatgcccggggcggatttctgctcacgctccgggttttgtgtctggctgaccagcacggtgatgaggtctttccactctgccggctccagcttttcgccgtaccagataacctgatcgcttaggtctttcaaaagtggccacatgaggcgattctgtttgtcggtgcggctttcttcgcgcgcctcgataatcagcggcgatcggtggtcgacgggcagagactggatgaaactgacggcgttacgcttaacgttgtcgttgataaggcagaattgttgcttcacgcttcacctccggagaggtcaaacgctgaatgcagaaaatcgccggtggctttcgccatcggtgacagggattgctgtacggttttgtgcgccatgtgtccccacttggcgccggaagtaagtcgtcagttgctcaggctgacgaggtaattatcgcccgtcacggggataaaagcaaaatgagcatatacgagaaaatcgctattttttggcgttctgctcagccatttccagatagcgcggatcggatgctcggggtagctggatgctctgctcgcggtagtagcgaacgcgctccatgaaatactcgcgcagatgctctggctgctctctggccaccacttcggcgacaactggcatgttcaggcgctctttgtaagcgacgccggacgctgcgaggtcaacgttgaccttgtcctgctcgtctttcggtttggctgcaatgttccactgtgacattaaattttttccttatcaaatcccacctcagacagtttcctggcaagcttcatagaatcagtaaagagtgtaaccaatgaacttttaagtccaatttcttcaacaaattctttaggagttacgtcagtaaggtgatggtaatatttgataatctgaagctgaacagtaactgttctgtctccttttggggcgcaatcgaccgtctttctgatagtggaaaaaacatctgattttttcatagggtaccctccttggcagagtataccctaccagaatactttataatgtcgcggatttgcttactgcggtgggtttaggcatcagtcgtcgtcatcttcctcatcctcgtcgtcatcgcaggaatcaagcagcggattcatgcgccgccctacctgactggcgtacccgcggcggcctaggttgtgcagcacgccgtagatttcgaacatttcggttcgctcatcaccaatatcaagctcacaggccagcgtgtggcattcagtagcgagcgccgatatcttctcaagcaattcggccttattcacttttcacctccagacgccagacagcctgaccaatgcgactctcgtggggacatttggataccagcccatccttcgccagctcgatgagcgcttttcgcaggtctgcgtttttccactccaccccggggaatttgcgctccatcgcgcatcgaatattccaggtagccacgcgatagggataatggccgtgtgcccatttctcctgttgatccactccctcgatcaacacctgcatgattttgctttttacgtcactcacctttcgcctcctgcggcccagccggcagctgcatccagtgggtgggctggcaataaataccgtcgccagttctccacgttgcgaacctgaaatagccatccagctcattacgctcaaggtaggcaaccatctgctccttcttatctgggcagtaaacctgaacgtcaacttcacggtctggcatccgctcacttaccggaatccattcacccggcacggtagcgggttcactgccgggtgactgcggggcggctgcaagcatggcggcgcggcaggcgttccagcccttcacctcagcgatggctgctactgcatccacggcgtacatgctcagtgtatttggaattggtttttcctccggcactaccggctgctgcgcgtggcgatagagcggcgctatgtttcgctcgaggtcggtaatgacgctccaaattgggactgactcgacgccttgtttcgccatatcacgataactgtcggcatacgccagcacaggattgcgatccagctcgctgtccgctaccggctgcactggcgacctatctggacctttgcgaatagcttttgccagctcgatagggtcatcgtaaagccagtctcctgtttcagggtgattggcttctgccagttgggcggcccattccagaccgtctttgtgcccctgcaggtagtcgagaggcaaacaccctgactcgctgtccattgcggccagcgccatgctggccaatgccgaagcctcaccgcattgcacatggtcagtctcgataatgttgagtagtgtttctcgtgaaaattcgctcatttccggtccaccttaattttgctgagcgcctcaaagtgcctgcgcatagttgcctgtacttcgggatgctgccagttggtatggatgccgccgtcttcgtcgatggtgaatttaacggcgttttctttgagaacgcgcttcaggcgctgctcggggctttcgattatgaacatcaatcagcctccaccttgatgccagcggcagcgagcatctcttcaatttcccagcgcgcataaaccggatagcgctctgacccatcgcagcagcggtctttctcgctatgagatacagctacatcatcccagtaatcatctggcgcatgacctgcctgaatccagattaagtgagcgtgtggcttcggcagcttcacggtgacggtgcgggactccagctctgcgatgcacttagcctgccagtcaacgaagtctgcaagtccaacgcctttttcgcgcaaaccgtagtcatccctaagcatgtcatatacatctgctttggcctgcgccttctccagcgcctctaccagcgcgaggatgtttgcagggttagccagggcgatgaactctccattcctgtctgtctgagcttgggtgaaatcaccactatcgacatagaggattgagccctgagattcatcactgcctacgtcatactcaatgctggtatttttcggaaaataaacccattcacccggagtagccttctctgctgccgctttcaggctctgcgccagttcggtgatatcagtcatggttgactccctaaatctcaaaggccaattgcggcataaagcggtcgcgttcggcgttatagttgagcgcactggcgctgttcattgactcgatacgctcaacgagtacagcggctctcgtttctttgctggccggtgcataggctgatttctgccatgatttatcgataccgatattgcgggccacgtttgtgctatcagctgatgacagcggtatatggcggaaaatatcggcattaagcatccgcaggccgtgcagtttgcaaatcgggtagccgttctcatccacaacatgccggattaagtcacgcaggcgagccacacagcggcgcggccgctttgcgtcgtattcgcccatgctgccgattgccacgcgggggaactcattgcagagctgaataaaccgctcgtctggttcgttcatgtgccacactggagccccaataaactttccgtgtggccactctgctatcagcgcatcgttttcctcgctactgccgccgataacgtccgggataatggcgaatgagaaccgcgggtgattagcccaacgctcgacgaaccggtaatactcgttccagtccacaacgcgttttttcgtccagaaactgaatgcgccgttatccagagcaaatgactgagtaacctcgctagccagtgctaactgcccggcgtttgcaaagctaatgaacgcatggcgccccttccacgctttcaacgcacaggtatctggcgtgattggccctccgtggaagtgaatcatttggccccctcgctgcggaacatcatgattgtcaggtcgcctttagtggccaggcgaatggtagagccaggttccagactgttaagctcaaaggcgtcataaaactcattcacagctttctggcggcgagattccttacgacgcttgtcccactgcctcagagcatttttggtaatccactggcctgttttaaccatgatgtatgcccatccaagaatggctaaaccggtattgagataagtggcgacgctcatttgtcggccccctcgcgcagcttggaggaaacgtcagaaagcatctcctttacgctatctgcgtaaagcattccctttgtatgaccaataagatcaagtaccatctccaccccatcagccttaatcccggctacgatgcgatcggtggcgggggttctgatgcctttaagaatgactacatcgcaagggtcgccgttcgtgctttctatccattcaatcgtatgatcaacagccgatttgagcgccacattctccgcagccagcttatccatttcgatgctacgacctttccagccctcccacattgcagccatcatcatgaaccagacatttccgcaccccaccttcttctcgttaaagaaccaggttacgaattcaatgctcatatcgttttgctgtgcaatctgttcgatttcgtttttcattttcttactcccgccaggcactggttaaacaggttagtcattgggtttactccgtcaggacgctggcgatactgaacagacggatcgctttcggttacggctgtcgtgtcgatcagtgtgtaccggtagctcctgcactccccttctcgcttaacctcgccgtcacggttcatctgccacagggaggaattgaccactgaagagtcaaggccggtaccgcggcggatatcctgaaagctgcagcctggatgctggccgatgaagttaataacggcttgtttgcccgagttctttttcatcaaaatccaccccgcttggttggtttttcctctttctcgcgccggcgctgactggcagcctcctgatcgcagtcataaatcgccccgtgacgttgctcgcaatagacaacaccagtctcaccatgccggttaaggcgcaggaggagctctgtgtcactctggtttgcgttctcgtcgtaggcgccctcccggtatatggccagccagtaatcgcagtcctgttcaatctgcccggtgtcgcgggagtcactcggcaaggggcgcttattggttcgcttctcaagctcacggttaagctgagtcaggagaaccacgacgcaatccagctccttcgccagcgtcttgaggcctttggtgatcagcccgtaagccaggtcatttcgctctgccttatcggcagtcatcagcgtcaggtagtcaacgaggatcattccgaccttgccgcgttcacgcttgatgcgacgtgactcagccacgacatgcgccagtgaaatacccggtgtgtcatcaatcaggagattgttggtttcaataagggcgcccataacgccggtagctttcttcagatcgccgttccagtcgccgcgatatccgtagtcttccttcgtcatatccgggtaaaacaggtttggagagatccgccccttctgcgcagtgattttctccaccatctgcccttccggcatttccagtgagaacatcagggccggctcattttctaccgtggcgcagttgatccccatctgggtatagagcgtggttttacccatcttcgggcgagcgcctataacaaacaggctgccgcgaacaatgcgcttcacaccgagcaactcatccagagagcggatcccggtagataacccacgggaacgaccatccggcttgagcctttcgtcgaattccgccgaccagtcagtaacagcgtcatagaacgtgcgaagccctgtccgtatcccggtttttacgtgctcggttatctcagtgaataatccctgaattgcgtcaaacttctgttctgccgtcatgccgttacgggcataaagcaactcgatcgccttcgttgttttctcgatgccgtagcgctccatagcggtctcacgaacacgcattgcataggccacgatgttcgccgcgcttggcgtgttcttcgacatttcagccaggtatgcaaagccaccaacggtttccgtcagccctttgctatcgagagcatcaaacagggtcagcagatcgacaggcttatggtcgcggtacatctggcgcatttctgcgaaaatgacctggtgctgacgcgagtagaacgattccggcttgaggatagacagaaccttctgagtgcgttcgctgctgtcgtcatccagcagaagtccgccaagtacgctctgctctgcttcaatgctgtgcggaggagtcatgaaatcagaggtcatcacaggctccctcgcgcgttttggcgtagacgtcgacgttcaggaagtattccagcgacttgcggcgccaagttttcccggtgcgctgatcagggcgattctcaagcatccagcggcagttactggcgatgtagctcaggtaagactcccagtcggccagggtaaagctgtggccatcaagctgacgggtgattttgttggccttctgccagaacgagcggatcaggttacgtcgcttgtcagtaaggatcctgatgccttgtgcttctggcagaacctggtggtaaacctcaacaacctgctcacagctgagagacggttttttcggttctgattttttcgatgctgatgcactctcttctacgtcagtagaagagatattatttaatatattgtttgtggcactctgttggcattctgttggcacaacctcacttgtacgcagcgtggttactgggtttgcgttggcactctgttggcattctgttggcacaaaaaactgctgataatcgtcatatttggtgacggttaagagggtgaatttcttgtttgccagggtggtgaccatgcccattttggcgaatttgttcagaagatatttcacccggtcaggtgctattcctgtgtctttcgacagggtatgtcgcccggtgatcacctgaccgcgggaaactggatactcaccaaactctgtggttaccatcccgtcagctgaattcacctccatgatgagatggatccacagatggacggcttcactgtcggtcttgtagaacggcagctctcttactttacggtgcaggaataccaacccctgccctgatggctgaggtttttccatgggcttctgagaccctctaaaatcggatatgcggagaacgttactcacggccttcctccttccgtttcagctcttccaggatggcgcgcattttcatgccaaccaccgggttaaccgagcgaatgaagcgatcgcgggtaacatttttgtgtgtttgtgcctggtaaaatctgttgctcttaggcataattactcctgtgaattgatccagttaattcgcgtagaaagccgttagtgtttgcccactgcggctttcgcctttctgttcccactcatgcttcaaagtcacctttctctcccggcctgttagaaatcaggatggccagcagcagcgacatgttcggaagcagactttcccgccagcgactcaccgtcgacttattcactccggccactttggctatagttgtggtccccagttcagctatctggctgtgtaaccagctttctatcctctgagcctccactttgttgcgtgtcgttgaactctccatctgtgatacttcctctggtggtgtttgaaaggccgattaaatcggcaacttattgagattgagatggcatctcgccataaagcagccacttagggtcgcaatggagcgcagttgccagttcgaacaaataacgtgggcgcttggttgtcccggcctcaattgcctgcagagactgctgtctcatgccaactttttttgctaattgcgcctgagacagattcatctcttcgcgcttttttttgaggcgttgcgaaatggtttccatgttacctcctacagttttatctgtattttgtgacagttatttctgtttgtcaattacagttttaactgtgaatatcaaggcatacattgagagggatttatgagccttgcagatcgcgtaaagcaaaagagaattgagctcggtctaacgcagaccgaggcagcgttgaatgccggaataactcagcagtcatggcagagcattgaaaagggagacaccagaaaaccgcgtaacattattggcatagctaaggcgctaaagtgcgatcctgactggctaatgaatggcggagcctttatgcctattgctgaagttagcagcaagaaggtgcctctcataagctatgtccaggcaggggctctcgcagaaaaaaatcccattgaggcatttgatgggagttttgagtacatccttacagacaacgaagtttctgattttacttttgctttacgcatcgaaggcgattcgatggagccagacttcaaggccggagatgtgatcattgtagaccccgaagttgagccaacccccggagagtttgttgtggccaagaacggtggggctcaagcgacctttaaaaaatatcggcctacttacacggatcacctgggctgccagcatttcgagcttgtgccattgaatgatgactacccgattatcagtagcgatcatcaaccactaacaatcatcggcgtgatgattgaacacagaatctatcgaagaaagcgctaaccccctccccctctcagaatagaaccggcgtatgccggtttttttttcgccccatcaaaataaatcacctttcattacagttagatatgtaatcaatgacaaaaaatacagttttgtctgttgacgaaaatacagttttatctgtaaatttaagccatccaaacaacaccggcaacgccggacgtaagtcaaacgctcagctggccggctttaaggcaaaggtgaagagatgatccgcgaagaagacaagcctgcatggcgtaatttttggttaaaggtcgttccgtttttggttgcagtcctcgtagttagcattcagtgctggggtggaaaatgagcaaacaaggcattcgttcactgatttactgcctgctgatctgcggcgttatatggacagcgttgattatcaaaattctgcacgttacgggggtgttcaatggttagtcatcattacgggacacagaccgttaaccgcggcgccgttctcccagggatgctcgttaagcatcgggaaagcacctggacagcatcagcaaataaacgcggccgcctgtacctgcatcgcgggattgagcggacttacacaaccgacttgctggttgaagtttatctgaacgggttgggacaaggtctcagccggtaatcgaaacgaagaatttaactgaactatcaggcggctttcatcgcgccgggaggcacgcatgctgaataaagaaagacttgatgagttattagattattcgcctgattcagggttatttacttggaaggttaaccgccggggaaaggctaagtctggatgtatcgcaggaagcaaaaatggacaaggttacattctcataaaaattgacgggaagttttattttgctcatcgcctcgcgtggctagttacgcatggaacattcccagtcaacatgatagaccacattgatggcaacagagaaaacaataaaatcaataacctaagagaggccaccgctgagcaaaatatgtggaatagcgcagccgggaaaaataacaaaacaggagtaaagggtgttagctgggatggcagaaggaaaagattccgggccagcatatccataaaagggaaaaacaaagaaatagggagttatttgtcacttaaagatgctgagtcggcaataaaggattatcggctgaaactccatggcaaatttgcaaataacgaagttattaataacaaccttttggaggggaaaccatgagcgaaataatggatttagtcgtcattgagaaaaagaacgcgatggcggttttcaccaataacgaccagctcgacccgcttattgaagcgatcgaaaaagaggctcgcagcctggttccggacgtaaccaccaaaaaaggccgcgacgccatcgcatccatggcccacaaggtcgcgcgctctaaaacctacatcgacaacgcaggtaaagatctggtcgctgagttaaaggcgctgccaaagcaaatcgatgaaagccgccgcgttgtccgtgagcgtctcgatgcgctgaaagatgaagtgcgtcgcccgttgaccgaatgggaagccgagcaggagcgcattaaggccgaagaagccatgaccgcccttcacgtcgaagcactggccatgaatgaagacttcgatcggcagctggcagctcggattgagtctgaccacgaaatggctctgctgatgaatgacgctttcgatcgtgagcaggcagataaagcggctgaggctgagcgccagcgcattgcccatgaagaagaaattaagcgactggcagcagctgcagcagcccgcgaagttgagcagcgcgcacagcgtgaacgtgaagaagcggcgcatcgtgaagctgtgttgaaagcacaagctgagcaggcagagcgagatcgcattgcagccgagcagaaagctgaggctgaaaagcaggccgctatcgaagcggaacgccgcaaagcacaggaagaagctgaccgcatccgccgagaggcagagctgcgcgaacaggcccgcctggctgaggagaaacgtaaagccgatgagcaggcgcgccgcgaagccgacgttaagcaccgcaaggctgtgggtgccgaggttgttaaggctctgatggccaataccagccttacccgggatcaggctatcgaggtgcttgccgcggttaaagacggccgcattcctcataccggtatcagttactgaggtgcttatgaacgcataccgcgcatatgacgtgatcgaagagcgtaagtgggctgaacaaacgctgtcagaagagaaggaaaagtggattgaagatcgggcgcaggaaattatcgacgccctgccgaaagagccctcaggcctgttccgcttctctgtgccgatggacaaaagcccatacgaaggcctccgcagcgattccgccggagaggcatataacgatttcatttcggcagttgcttacgcccaggcggaatacgactgggatcaccgcaccggctgcccgttttaaatttaaggggaattctatgagcacagcactttctacaatggcagggaagcttgcctcccgcctcggcatggatgccggaactgacctgatgaacacgctgaaaaatacagcatttaagggtgggaatgtcactgatgagcagttcacggcactgctgatcgtcgccaaccagtacggactgaacccgtggacaaaagagatttatgcattcccggataaaggtggaattgttcctgtagtcggcgttgacggctgggctcgaatcatcaacgaacatcctcagtttgatggaatggagtttgcctacgacaaggaagaaggcgcgtgtacctgcaagatataccggaaagaccggacacacccgaccatcgttactgagtacatgggagagtgcaaacgcaacactcagccatggcagtcccaccctacccgtatgcttcgtcacaagacgctgatccagtgtgcgcgtctcgcatttgggtttgctggcatcttcgatcaggacgaagccgagcgtgtcattgaagggagtacgacagaggttcatgtagggcatgagtcggatggtcgtcgcccggaactgatcgcaaaaggcgagtctgccgcacgccttggaactgttaagtaccaggaattctgggtggcgttaagcgcagaagagaaacaggttatcggcgcggttgagaagcgtcgcatgtatgacatgagccttgcagtcgacaacgcagaacctgtcgatgccgcagcgccggaggataaatgatggaacaacgcaccccagaatggtttgccgctcgctgcggaaaagtcacagccagccgccttgctgacgtcatggccagaaccaagtctggctatgcagcaagccgacagaactacatggccgagctgatttgccagcgcctcaccgggaagcttgaagaaggtttctccaacgccgcaatgatacgcggaacagaactcgagccggtagcacgcgagatgtatgcgctgaatgagttcgatgccgaaatcactgaggtggggcttatcgatcacccaactataccaggattcgcagcaagtcctgatgggcttgttaatggtgatgggcttatcgaaattaagtgccccaacacctggactcatcttgagaccttaaaaactggcgagccaaaacgccagtacctgttgcagatgcacgctcagatgatgtgcacagggcgcaaatggtgtgatttcgttagtttcgacgatcgtctaccgccagacctcgcctatttcaaaaagcgcattcacttcgacgaagcactggcaaatgagattcagtccgaagtgaaaaagttcctggaagagctggagaaagagatttccagcataaaaaaccacgaccatgccgcatgagaaaggcagacacgaaacgaggtgcgcaatgactgatttcggcggatcgaaaactccaaaaaatgaacgtgactactggcaaacgccgattgaaattttcaacgcgctcgaccgcgagtttggcttctggctggatgctgcagcctctgagagtaatgcgctatgcgctcactatctcactgagctggatgactcgctgaacagcgaatggacgtcatgcggctcgatctggtgcaacccaccctattccgatattgggccgtgggtggaaaaggctgctgagcaatcccgggcgcagtctcaggccgtagtgatgttgctaccggctgacatttctaccggctggtttatttcagccatgcaatcagctgatgaactcaggctgataacgggtggccgtgttcagtttgttcctgcatccgttacaggaaagcgccagagcaacccaaaaggctcgctcctgtttatttggcgcccgtacatcaccccgcgacacatcatcacgtccatatcgctggctgagttaaagcggatcgggaatctggaggctgcatgacgccagaagaaaaagaaaacgctctccgcgcccaggctcgtcgctgcgcagaagagataaccaaagcgatgagcgtaaagcctaaaccgaagtggaacgctgtatgcccccccatccttcgcaagcactacgagaaggtaaagccgatgggtgtcagcctggtgaaatttgtcagtgttattggccgcatgaatgggcggtatggagtggaatcatgagcaaaaacctacacatcgaactcggtgataaatacgtcgtcacagggtcaacgcatgacctcatcctgaacgagaaacgcatcattaaggatggtaagaacgccggtcaggaaacgctggctcgactcggctactacagcaagtttgagcacctggtgaaagaactttgccatcgtgaaattctgcaatcagaagcgcagtcactggaagagttacgcgactacatctttgctctcggcgagaagctgagtaaggcggttgagtcatgaaagaacgcggaatgatttttaacggggagatggtgcgggccatcctcgacggccggaagacgcagacacggcggattatgaaacctcaaccagaaccatgcccccggggtggacactggtggccaagcaacgtgttcaaaacaatgcttcatgtcgaagaagaaatgcagaacggcaaaggcggctggggtgggcttgttggagatgcttgcccgttcggggacgtcggcgaccgcatctgggtgcgtgaggcttatcgtttcccggcatcgttagacgatgttagcccaactggtgttggtgaaatggctgtggcaacaggatacagaaaaccatgggcgccgaccttctacgagtttacaggcactttcagtgatggatggaaaggattcgaaacccctccaaaagtttctgacgccggaaagcttcgcccatccatccacatgccgcgctgggccagccgcattctgctggaaatcaccgacgtgcgcgttgagcggctgaacgctattagcgaagaggatgcgcgagcagaaggcattattgacggtggctgtcttaattgcggagaacctgagccatgtggatgcgccaacccagagcctgacgctaccgatgcttttgcctacctgtggcaatcgatctacgggcaggaaaactggaatgctgatccctgggtttgggttatcgagttcaagcgcattgaaggcggtgcagcatgaaagtgaagacagaaagtcttacaggactacaccttgatgttgcagtagctatcgcgttaggtggagaagttaccaggccgcaagatgctcaggtctatttaaatggaatgcatcagctatgtggcgagaaaagcaaacgccatagccgctatgtgttttcaccatctaccgactggagccagtgcggagagttaatggagagcttttcgatcagttgttaccagtcggcagatcccgccacaggaaaagtctaccactgggttggcgtgagcgagttagcgtctccaggtaagcgacgtggactccttgcagacaatccccgcgctgctgtatgtcgagcagtcgtattcgcgcagttgggtaatgaagttgagttgcctgatgaacttaaaagtgaggaatgagcatgagcgcagaaatcatcgatcaggccaacgagctggcagagcgccggctggaaatgaccatccagaatatgcgcatcaatcatgcggcagtttcggctactcactgccgcgactgcggggaagagatacccgagcggcgccgggaactggtggcgggatgccagcgttgtgctgactaccaggaagaggttgaagcacgtgataagcatttggctgtaacgagaggtggaagatgaaacatgagatgcaaccagatagccttgttgatctgaaattcatcatggcggatactggctttggaaaaaccttcatttacgaccggattaagtccggcgatctccccaaagccaaactcatccacggcagagcaaggtggttatatagtgaccattgtaagttcagagaaaagctcttgtcccgctccgatgggtaaagtaacgagtaaaatatttttcacacgtaaaaaatatcatccatttcaatcccctgcacatcaggttagatgtatgcaggggacaccatataaacgttgcccgccattcaccacgatgacctaaacgccagccagaacgtattcttctcgtaatcataattagccaacgatttcagtatggttagtcctgccagaaaggaacgtgtctttgtcaatcacgcacacaataaaccgacagcaacgcgcatttctgcgtacaataccttctgactttttcagtcacaagccactaccccggtgtaatcttctccggacaacaaaggagccaggcgttgatatgaaacagatcaccctcagcgatatgcagcagcagagcgaagcggcagccagtgctccgcgcctgcgtgcccatcgcaattttcatcccgaactaagcgacccgatacagcgtctggccatcgccatggaacccggcacctatatccgcccccaccggcacagacataccttcgaacttttactgccgctgaaaggccgatttgtggtactgaattttgatgaccacggcgtggttacccgccgggtggtgctgggtgaaacctgcacggcgctggaaatggaagccggtacctggcatacggtgctctcactcgacgctggcggcatggtatttgaagttaagcaaggtgcttatcaaccgcttgccgaaatggacactatggcctgggcgcctgctgaaggccagccaggcactgccgaaatgatggcctggtatgccatcgcgcaaccgggtgaccgcttcctgtctatgccgcaataactacaggtagcttcgacaggcgccgcaggcgtctgtttgatacttcctgccgaccacaaagtttgccaaattgaccgtcccttttttcgtgctccgctcatactcaccttaaatattgctgctaaacaggaagaaacgcttatattcagcaaactatttttctctacgaataagagatgataagataacgggaaagagtaaatatgcggcagcaaaacaataaaaacagccaatttatcgatatattattctcaatgtgaatggattttgttaatcaggtaaaggaagtcagcagaaaaaataaatcattgtcattgatacttttgctcaccatggcgatttattttttcatcgacatacaattcttatgaatattacagaacggaatatctggaagctaaataatttaccaccaatggagtattgctctctggcgcgggcgcaaaaattattaaactgcgaactggaagacattcttcactggcatgatataggcgcaatcaatctatgtcttaagcttaacccaacgccgggaatattaaaaatcgccgtcctctcccatcaggaaaaagaggtaaccagcgcgtttaatccatttacctcagtcgaggcaggagaaacagtctggtcgcatcactcccatatccgcagcattctgcgacttgaaggcgatattccgacgatggaaaccctgcgcggaaatacggtaacccagttcaacgtaaaggtatttgcttcagggctctggcatccacactgtcggaacctaatggcgctgctggaggcgccagatgatattcttttcgaaaaccgcctcagcatgatgctgccggataaaccatttgtttattgtcatttcattccagaggaagacgaacgcccctcgatatcattgaaccgcatctatatcaccagccaggccattgagaaaatatacgcccacagtattagcgcccggcctatggacgtgacgaaaaatccgctactggatcaaacccgttacatccagcaggaattaaccgtcctgccgcaaagtgaggtattgctggaatttatccattatcttgttcagtcccatactgtatttaatgagaagttgcagaatatggctgagccagacaagactcagctctttcatcacgtgctggaaaggcttaaggaagaaggcatgcttatagagaatgcccagcccgatgaaggcgatatcggcagcgaagccagccgtgagtcgcagttcgccggcgagtaacgtagtccttcaggcaagggactggcggttttcctgctcaatcgttatcgcgttctctcgggccagggtgatgaattcgcgcgctgcggcgctctgccaggcgccctgccgctgcaataaacaggccgtgcgctgcagcagcgcaggtcttagctcaatcgccaccacatcatcaaactgtccggcgatcgccgccggtagcagcgttgctaacgttgtgcttcgaataaccgacagaacggccccgatggagttggcctccatccgcacgtctggttcgagccgatgaaggcggcaataacgatcaatctgctcgcgggtagcaaactcgctgctcagtaaaattagcggctgggcgtcgagagcctgcagttgcaagtcgcgctctcctgccagcggatgcgcacggctcaccaccagcgcaagcgtttccgtcagcagcggctgaaccacaatttcctgtgaccggctgtcgtcaaaggcaatccccacatccagttcatcctccagcagcatcgcctccatccgctcctggttcatctcctggataagcacttttactccaggatagcgtcggtagtacgcctccatcagcgggcccagcatataggtagtgaaagttggcgtcatagcaatgcggagtttaccgtgctggagatcttctgcgtcatgcaaggcgcgccgaccttcctcaagctcgcgtaacgcgcgacgcgcatactccagccagatctcaccggcatcggtcaggcgaatacgtcggccagagcggtcgaaaagctgaacctccagcatcgcttccagctggcgtatctgctgtgacagcgcaggctgggagacatgcagcgccgcggcggcgcgggaaaagccacaatgttcagccacagcgataaagtaggaaagttggcgcagaagcatcggcccacctataagaaattccaataggcattatcataaataagtcttttaacttatgaaacaagagacgtaccctcttcgcacgaccctcaacatatttcacctttaacatcgttttatgcaggagtgactatgtccgctcacgatcgttatcttcagcgcgcattagtgctggcaaaacaaaacattgctgacggtgggcgccccttcggcgccgtgctggtgcggaatgatgagattgtcgctgaaagcgtcaatacctttcatctgagcggtgacccaacggcgcatgccgaactgaacgccgttcgcgatcttgccgccagacagggaagcgcggcgttgcgcgaatgcgtcatctatgccagcggacaaccttgccctatgtgcctgagcgcgctctatttaaccggcgtgcgggaagtgtttttcgccaatagcaatcaggacggggagccttttcagctctcgaccgccgcgatttatcagcagctgcagcagccgctggaccagcaaacgctgccgatccatcatcgcccgcagccggagggaactgaactttatcagcgctgggcggaacggcagtcatgacaccagcgctgcgacagaacctgacgctggcagtcctggtactgactgggatcaatatgcggccgctgcttacctccattggtcctttgctgccggacatccgcgcagccagcggcatgagctataccctggccgcactcctgaccgcgctgccggtgatcgcgatgggggtgctggcgctggccgctggctgggtcgatcgctatatcggtcaaaagcgcagtattgcgctgagcctgctgattatcgcggtaggcgccctgctgcgggaaatcgccccgaatagtggcttactgctcaccagcgctctggccggaggaattggcatcggcattattcaggccgccatcccggcggtaattaagcacctctttccccgacggacgccgctggtgatgggactatggtcagcggcgctgatgggcggcggcgggttaggcgccgcgttcaccccatggctggcgtcacatagcgcggcctggcatgatgcgctagcctggtgggcgctccctgcgctcctggctctgctcagctggctggcgatttgtcggcatttgcctcgcgcaccgcatcagaccagcgcttccccccgggtcgcgattattggccagcgccgcgcctggacgctgggactctatttcggactgatcaatgccggttacgccagcctgatcgcctggctgcctccttactacatccagctaggcgacagcgcccagtacagcggttcgctgctggcgctgctgaccgtcgggcaaaccgccggcgcgctgctgctcccggcgctggctcgccaggaggatcggcgccagcttcttctgctagcgctggcgctacagctgattggcttctgcggctttatctggctgccagagcatttctctgcgctctgggccattgcctgcggcgtgggattgggcggcgcgtttcctctgtgcctggtgctggcgctggatcacgccggacaaccggcggtggccggcaggctggtagcctttatgcaggggatcggatttatcatcgccggtctgtcgccctggctttcaggcctgctgcgtagcctgagcgggaactacacgcttgactggtcctggcatgcgatctgcgtcctgctactcatggcgctgacgctgcgctttatcccggcacactacccggccgagtggcgacagcgcgcctcagacctgccctgaaccgacggcggcgcgtggcaaagataatgccgcgcgctctcgttggccttctccgcccgccccatcgctaaaacccgtttccttcgcgtcgctggcgctaaatttattaccctgtgaaattaatgtgtcgccgaatcacgacactcgtaagtaactaaaaattaataaaaaaatgcctcttgtttccctgattttttaggcgtacattagcgccatctggagcactaaacgcacagaattacgggctgctgcagggtgaagttacactggcgacagtccttgaaaaacagaacaattaattcatttgaacgtcgcacaagcgcgtggagtgatgagtcgtgaaatacttttttatgggcctctcttttatggtcatcgtttgggccggtacttttgccctgatgatctagactgcagcggtgtcaaaaaaaacgggagccttcatgctcccgtttttattttgccgtgctgcccgcagcgctagctcgcggaggccagcagaccatccgcgcggaacatcgccttgataccgcggatcgcctggcgcgtacggtcccggttctcgatcagcgcgaagcggacgtgggtatcaccatagtcgccaaagccaatccccggcgagacgcaaaccttcgcttcattaagcagctttttcgcaaactccagcgaccccatggcggcgtaaggttccggtattttcgcccacacgtacatagacgctttcggacactccaccatccagccggcctcatgaagccctttgaccagcacatcgcgacggcgcttatactgttcggcaatatcgcgcacgcactgctgatcgccctccagcgcagctatcgccgccacctgcagcggagtaaaagtcccgtagtcatgatagcttttgatacgagcgagggcattcaccaaagtcttattacccaccataaagccaatgcgccagccggccatgttatagcttttcgacagggtaaagaactcgacggcgacatcccgcgcgccggacacctgcatgatggagggcgctttccagccgtcatacacgatatcggcataggccagatcgtggacgaccagaatgtcatactgcttcgccagagcgacaaccttttcaaagaaatccagttcgacgcactgcgcggtcggatttgagggaaagccaaggatcatcatcttcggcttcggatagctctcgcggatggcgcgttccagctcgttaaagaaatccaccccttccaccagcggcactgagcgcacctgcgccccggcgattaccgcaccatagatatgaatcggatagctggggttcggcaccagtacggtgtcgccatgatccagcgtcgccagcatcaggtgcgccagcccctctttcgaaccaatggtgacgatcgcttccgattccggatcgatatcgacgttatagcgttcttcataccagcgtgaaatggcgcgacgcaggcgcgggatcccccgcgaggtagagtaaccatgggtgtcaggccgttgagcaacggtgcagagtttttccacgatatgcggcggtgtcgcgccatcgggattacccatactgaaatcgataatatcttcgccgcgccgacgcgcagccattttcagttcagcagtaatgttaaaaacgtacggagggagacgatcgatacgcgtaaaacggcgttcaggactggattcagccataggttcctctaattaacgttagcgcccggaccgtccgagcgacgctgccgctgttgcggctcgtttagaaaataacctgaaaaaattcatgttgtcgagaggcccgttaaaaaatattccctggcatataaaacgggtatcgactgcgctaaatgcggcagttcattggcggaataatcccgggttgtataaaggtggtaacacactgatatctttcttaacacagaatattatcgttaatggcgaagaccgccgctatcgcgatgctttttaattaatccccattaaaaagtgcgacttttccgctttatggttccacggctggtcttctgccgtcaggttttttatcatgtccctttctggccactgacgcggcgcacccatgcacgaaatctttactatgatgctggcggtctatgatcgtgcggccctgatgcttatttgcctctttttccttattcgcctgcgcctgttccgcgaactgttgcataagtcggcccatactccgaaagagctgctggcggtgacagccattttctcgctgttcgcgctatttagtacctggtccggcgtcccggttgaggggtccctggtgaacgtgcgcattatcgccgtgatgtccggtgggatcctgtttggtccctgggtgggcgcgattgtcggggcgattgccggcgtgcaccgctatttgattgatatcgacggcgtgaccgcggtgccctgctttatcaccagcattgtcgccggcctgctgtcggggttgattaatcgtaaagtggcccgcgaacaacggtggaaaatcggcattctggcggggatgatgtgtgaaactctgaccatgatcctggtggtggtctgggcgccttccctgagtctcggcgtagatattgtttcgaaaattggtatcccgatgatcctcggcagcgtctgcatcggctttatcgtgctgctggtgcagagcgttgaaggggaaaaggaggccagcgcggcgcggcaggcgaaactggcgctcgatatcgccaacaaaaccctgccgctgtttcgacacgttaacagcgattctctgcgccaggtttgcgagattatccgccgcgacattaccgccgacgcggtggcgatcaccaataccgagcacgtgctggcctacgtgggcgtcggtgaagccaactatcaacgccacgacgatatgattagccccaccacccggcaggcgattcgttatgggaaaatcatcataaaaaacaatgacgaagcccaccgcaccccggagatccactccttgatggtgatcccgctgtgggaaaaaggggtggtgaccggcacgctaaaaatctattactgccacgcccatcgcatcacttcgacgctgcaggagatggcgattggcctgtcgcaaataatctccacccagctggaagtctcccgcgccgaacagctgcgggagatggccaacaaagcggagctgcgcgccctgcaaagcaaaattaacccgcattttttatttaatgcgctgaacgcgatctcctcctcgattcgccttaatccggacaccgcgcgccagctcatttttaatctgtcgcgctacctgcgctataacatcgaattaaaagacgatgagcagattgatatcaaacgagagctgtatcagatcaaagattatatcgctattgaacaggcgcgattcggcgacaagctgacggtcatctacgatattgacgacgacgtcagctgcgtgatcccgagcctgcttatccagccgctggtggaaaatgccatcgttcacggtattcaaccctgtaaaggcaaaggcgtggtgacgatcggcattaacgagtgcggcaatcgggtacgcatcagcgttcgcgatacgggcaacggtatcgatcccgccgtggtcgcccgcgtggaagccgatgagatgccgggtaacaaaatcggcctgctcaatgtgcatcatcgggtgaaacttctctacggcgagggtttgcatatccgcaatctgacgccgggaaccgaaatcgccttttatgtccccaataactctacgccgcaggcgctgacggagtcgctgttgtcatgagcggagaaaagatgaaagttatcattgtggaggatgagtttctggcccagcaggagctctcctggcttattaacacccatagccagatggagatcgtcggcagctttgacgacggcctggacgtgctgaaatttctccagcacaacaaggtcgacgccatctttctcgatatcaatattccgtcgctcgacggggttctgctggcgcaaaacatcagccagtttgcccataaaccttttatcgtctttatcaccgcgtggaaagaacatgcggtggaagcctttgagctggaagcctttgactacatcctgaaaccttaccaggagtcgcgcatcatcaatatgctgcaaaagctgaccaccgcctggcagcagcaaaataacgctgcttcaggattagccagcgcagcgccacgggaaaacgacaccatcaatctgatcaaagatgagcggatcatcgtcaccagtattcatgatatttattatgccgaggcgcatgaaaagatgacattcgtctatacccgccgggagtcattcgtcatgccgatgaacattactgaattctgcagcaaactgcccaccgcgcatttcttccgctgccaccgctcgtattgcgtaaatctcagcaaaattcgggaaattgagccgtggttcaacaacacctatgtgctgcgcctgcgtgacctggagtttcaggttccggtcagtcgcagtaaagtgaaagagtttcgccagctgatgaatctgtagagagcggaaagcaccgccatccgggctacgacggtagcccgggagaagaatgcttaaagcacctggcccagcgtctgacgcagatgcgcgccggagcccagcaggcctgggttatcatgcacaatcaggtaaaccgggatatcctgaacataagctttaaaacggcctttgtcttcaaaaccgccgcggaaaccagaggctttaaagaactccaggaagcgcggcacgatgccgccggcgatatacaccccgccaaacgtcccgagggtcagcgccaggttaccgccgaagcgtcccataatgacgcagaacagcgacagcgcccgacgacagtcggtgcagctgtccgccagcgctcgctcggtcacctcacgcggctgcaggttctccggcagtcggccgtccgatttgacaatcgcgcgatacaggttgaccagcccgggacctgagagcacgcgttctgcggaaacatgccccagctcggcgcgtagctcttccagaatgatcccttcttcttcgctgttcggggcaaaatcaacatgaccgccttcgcccggcaggctgacccaacgcttatcaacgtggaccagatgcgccacgccgagcccggtcccggcgccataaacggcgatcggtttgcccgctaccggcgcactgccgccaaactgaataaggtgctcagctttcagcatcggaatggccattgaaacagcggtaaaatcgttaattatctccagatgggcaaagccgaggttgcgcttcatttcggcgatagagaaagcccaggtatggttggtcatcgccacccagtcgccggtaatcgggcatgcgatggcaatacaaccttcgttgaccgttacctggtgctcctcgagatagacgcgcaccactgcctccagactggggtaatcgagcccggaataggtctttgcacgagagatctctccactcgccagatcacatagcgccaggcgggcgttggtccccccgacatctcctactaaagcaaattttgtcattccgttacggctccgctaaagtcaaaataaatcttttggcacactgtaaattcatggcggcttaacaacaacgtccaacgcgcagacgccccttgtttagcgacacaggtcacatttagtttgtaatctatgcaaggtagcctgtaaaggacgcgccggatatcagatgtcaccttaactttatcgtttcagcaccatttgcatcgacggtctccgctgacgaaggcaaagtagtgctccagcacttttacaaggacatttccatgctccatcctcgcgccagaacaatgctgatcctgtcggtgccggccatcctgataggtatcgcctgcagcctgatcctgatcgtggcgatgaaggttgccgcgctgctgcagcgcgtgctgtggagcaatctgcccgcgcagttgggggtgagcgccgacagcccgctgtggatcatcgccatgctgacggcgacagggatcgcggtgggtctggtcattcgttacagccccgggcacgccgggccggatccagcgaccgagtcgttaatcggcgctcccattgccaccggcgcgctgcccggactcctggccgcgctgatcctcggcctcgccggcggcgtcagcctcggcccggagcatccgattatggtggtgaatatcgcgctggctgtcgccgtcggctcccgactgtttccgcgcgtcagctcgctggactggaccatcctcgcggcctcaggcaccatcggcgccctcttcggtaccccggttgccgccgcgctgattttttcgcaaaccctcaatagcagcaacgatacgccactgtgggatcgcctctttgctcccctcctcgccgccgccgccggcgcgttgacgacgggtctgtttttccatccccatttttcgctgccgatcccgcactatggtcagatgcgcttcgttgatattctcagcggcattatcgtcgccctgatcgctatcgccgtcggcatggtggccgtctggtgtctgccgcgactgcatgccctgatgcatcggttgaaaaatccaatcctgaccctcggcatcggcgggctgctgctggggatcgtggggacgataggcgggcccttaacgctctttaaagggctggatgagatgcagcagctggccttcagccagacgctaaccgccgcggattttctgcttatcgcgctggtcaaactggcagccctggttcttgcctcagccagcggctttcgcggcgggcgaattttcccggcggtgttcgtcggggtagcgctggggctgatgctgcatgctcatgttgacgcggtgccggcggcaatcaccgtttcctgcgcgatcctcggcatggtgctggtcgtcactcgcgacggctggttgagcctgtttatggccgccgtggtggtcccggatacgactttgctgccgctgttgtgtatggtgatgctcccggcctggctgctgctggccgggagaccgttgatgattgccaaacggcataccgattaaacgcggctgtttcgctcctcaagggcctgcgtcaccgcgcgcaggaaatcggggatatccattttcggcagcatcacttctaccagggtgagggtatcggaggtgatgctctccgtcatcgcctcccgcagttcagacgtctgagtgacccgccggcagcgcgaagcaacgtcaggggcgaaggcttccggcagccgctgccagtcccacagagcgatgtcattgtagcgctgctctggaccatgaatcgcccgttccacggtatacccttcgttattcagcagcagaataagcggcttttgcttatcacgcagcatggagcccatctcctgaatggtcagttgggccgcgccatcgccgacaattagcaccacccgccgctccgccgccgcggtttgtgcgccataggcggccgggagagtaaaaccaatcgagccccacagcggctggacgatcagcgatgcttcagagggcagcttcagagccgcaataccaaaggcggccgtcccctgatcggcgagaataatatcccccggacgcagggcgccctgcaccgtcgcccagaaatttttctgggtcaactcgccttcagcgccctcctcagcctccggcgccacgacctgaggcgtagcccactccgccgccagcggggcggaaagcgtcatcagcgcggccaaagccttatccatcggcaccccgctgaaccagtgatcgcccaccctgacggcgaagggctggatctcaatagtcttttcccgcgccagatgttgggtaaatcctgcggtgatggtgtcggtgaagcgcgtgccaatgcagatgatggtgtcggcgttttcaatcgcctcccgggtctgcggcgcgctggcaatcccgctgtaggtgccgacaaacccgctctgctgctcatcaaacaatcccttgcccatgagcatcgtcgcatgggcgacaggcgttttcgccacccactcccggagcgtcttctgcaggccataacgttgcgccaggaagtccgccagcagggaaatgcgtcggctgccccgcagcaggcggctggcatgttcgcagaacccggcaagctggttttcatccgccggagcgggctccaccagcaagcgctgggctggggcaatcgctgccgctctggcgacatcggctggcagcatcaaatagccggggcgatgatgcgtcaacatatcgcgcagcacacggtcgatttcatggcaggcgttgccggcggtcagcagcgcctggctacaggtgatctgctcgctcatgcgggcgaaatggcgaaaatcgccatcgccgagggtatggtgcagcagttcgccgcgctgctgggcgccggtagagggcgcaccgacaatatgcaataccggaatatgttccgcatagctacccgcaatgccgttcagcgcgctcaattcgccgacgccgtaggtggtcagcagcgcaccggcccctttgatgcgcgcatagccgtcagcggcatatgccgcattcagctcgttggcgcagccgacccaccccaaggcgctgtgcgcgatgacgcgatcgagaaactgtaagttgtaatctcccggcacgccgaacaagcggtcaataccgcagtcgacaaggcgatccagcagataatccccaatagtgtaggtcggttgcatatccattatcctcattttagtgcaggtgtaatttgagtattgaataagcgatccgcctgtccagatgggaggtgataatggcagtgtaaagcaataattacgcagaaaaagcagtgtactccacgcagaacattgtttagtgtaaacgtatacacaccctgttttgtcggcggaggaagaatggtttaccaggcaagcaccacgcgatatcaaacgatggagtaccgtcgctgcggccgcagcggtctgcaactaccggccatttcccttggcctgtggcataactttggcgatgaaacgcgagtggaaaccagccggcagatgctcctgcacgcttttgacctcggtataacccatttcgatttggccaacaactatgggccgccgccgggctcggcggaaagcaactttggccgcatcctgaaagagtcgctcctgccttatcgcgatgagttaatcatctccactaaagcaggttacacgatgtgggacggcccttacggcgactggggatcgcgaaaatatctggtagccagtcttaaccagagccttaaacgcatggggctggaatacgtcgatattttttaccatcaccggcctgatccacagacgccgctgatggaaacgatgcgtgcgctcgatcatctggttcgtcagggtaaagcgctatatgtcgggatctccaactatcctctggcccaggcgcgggaggcggtgaagatccttaacgacctcggcaccccctgcatcatccaccagcctcgctactcgatgttcgaacgcggcgtggaagaaggactgctggattttctgcagacggaagggattggaagcatagcgttttcaccgctggccggcgggcaacttaccgaccgctatctcaacggcattccggccgactcgcgcgccgccagcagcagtcgttttctgcagccggaacaactgactcctgcccgattagaaaaaattcgtcagcttaacaggcaggcggaagcgcgtgggcagaagctgtcgcagatggcgctggcctgggtgttgcgcgaagagaaagtcacctcggtgctgatcggcgccagcaaaaccgcgcaactggatgatgccgtcggcatgctgcagaatcgccatttcaccaccgaggagtgcgcggccatcgacgccatccttgcgctgtaaagcaaatgttactttagcaaaaagtgctctttcctgcgctttcggagttcgtccgatgcggtgggtctttaccggcccgtaatatcaggttaacaggccgcttacggccccgatcgtgaaggagaagagtatgttcaggtcactgattctggcagcagtactgctggccgcagggccactggtcgctaacgctggtgaaatcaccctgctgccgtcggtaaaattacaaataggcgatcgtgacaattacggtaactactgggacggtggcagctggcgcgaccgtgattactggcgtcgtcactatgaatggcgtgataaccgttggcatcgtcatgacaacggctggcacaaaggctggtacaaaggcagagataaagcctgggagcgcggctatcgtgctggctggaacgaccgcgatgaccaccgcggcggctggggacgcggcccgggtgggcgcggtcacggtcatggacatggccatcactaacaaacgaaaaggggagcccatcggctcccctttactttattcagcatcaggaatcaattaatccaccccgagcagcgaccccactattaaccagccgttcaggctcaccacaatagcgactatcgcccagccgatgcctctcacccaacgggtattcaccaggtcccccatcagcttcgcattgctggtaaatatcagcagcggcaccagggcaagcgcaatgccaaagctgagcaacacctgactcattaccaggatgcgcgtaggatccagccccagcagaatgacgacaaacgacggcagcatggtgatcgcccggcgaaaccacagcggaatatgaaagcggataaacccctgcataacgacctgacctgccagagtgcccaccacggtcgacgataaaccggcggcaatcaggctgaggccaaagatggtcgccgccgcgtggctcagcagcggctccagcgtcatgtaggcctgatcgagatcggcgacgccggtatggccattaaagtggaatgccgccgcagcggtcgccatcatcgccagattgacgaatccggcaatggtcatggcgatcgccacatcccagcgggtcgcgttatagcgttcttttcgcgttccgccatgcagatgctgagtcagcgatgagtgtaagtaaatgacgtgcggcataattgtcgcacccagtaccccggcggccaggaataccgcctccccgttgggcagcgtggggatcaccagccctttcgtcagaggagccagcgcgggctgggaaaagatcaactccacgacataggccacggcgacaaacagcaacaatccaccgatcaccttctccagtggtttttgtccgcgccgctgcagcatcaggatcagaaaagtcgccaccccggtcagcaccgccccctgcagaagcgacacgccgagcaccagcttaaagccaatcgcggcgccgataaattcagccagatcggtggccatagcgataatttccgcctgtacccagtaaaaccagacaacaggacgcgggtaatggtcgcggatctgctcggccaggtttttgccggtggcaatgcccagtttggcagaaagcacctggatcagcatcgccatcaggttagcccacaccacgacccacagcagctggtagccaaagctggcgccggcctgaatgttagtggcgaaattacccggatcgatatagccaatggcagcgacgaaagccgggcccattaaggcgagcttcaccttgcgcgcggcgcgactactgctattctcaacgcgactgctagtcatcttctgcctctggaaatatagcctttgctatgtttcatgctatcaaaatgcgaatgattatcaagttcatttagaatggagataatgattgctgtgatagaagggaacaatagctggccggaaatgaaatacgggcgtcagaaaacgagatccagcccgctattaagagtagtacaagaatgcaacttttaaaacctttacgtaacataacaaaagtggatgttggatcactatttttgccattggtcacagttccttgcaatagtgtgcaattgatctcgttttctttaaagccgttgcatagaatgtgcacggaaatttaacctgcctcatatttggagcaactatggaccgcgtcttgcattttgtcctcgcgatcgttgtggtggctatactggccctgttggtcagccatgaccgccaaaagatccgtattcgttatgttgttcaactgcttgtcattgaagtcctgctggcctggttcttcctcaactccgatattggtctgggttttgtgaaaggattttccgagatgtttgaaaaactcctcgggtttgccaacgaagggacaaacttcgtgttcggcggcatgaacgataaaggcctggccttcttcttcctcaaagttttgtgccctatagtcttcatttcggctttgatcggcattttgcagcatattcgtatcctgccgattgtcattcgcgcgatcggtaccgtcctgtcgaaagttaacggcatgggcaagctggagtccttcaacgccgtgagctcgttgatcctcggccagtcggaaaactttatcgcgtataaagatattctcggcaaaatgtcgcgcaaccgcatgtacaccatggcggcgacggcgatgtccaccgtgtccatgtccatcgtaggcgcttacatgaccatgctgcagccaaagtatgtcgttgcggcgctggtgctcaacatgttcagcacctttatcgttctgtcattaattaacccttaccgcgtggaagagagcgaagaaaatctgcagatgtcgaatctgcacgaaggtcagagcttcttcgagatgctgggcgagtatattctggcaggttttaaagtcgcgattatcgtggcggcgatgttgatcggcttcatcgcgctgatctcggcgctgaatgccctgttcgccaccgtgaccggttggttcggctatagcatttccttccagggtatcctcggctatatcttctacccggtcgcctgggtgatgggtgtgccggcaagcgaagcgctgcaggtgggcagtattatggctaccaaactggtctccaatgaattcgtcgccatgatggatctgcagaaaattgcctcgacgctctccccgcgcgcggaaggcattatctctatcttcctggtctccttcgccaacttctcatctatcggtattattgccggggcgatcaaaggtctgaacgaagaacagggcaacgtagtttctcgcttcggtctgaagctggtgtacggctccacgctggttagcgtgctgtccgcctcgattgcggcgctggttctgtaacagacgtcagtcatctgagccgggcaatgcccggcttttttttgcccgacattcacccagcggctgtggtttaccgatcagataaccctgcagataattcacgcccagctccagcaagcgcgctttttgcggttcgctttcgacatattccgccaccacgctcatctgtttcgcccgcgccatctcgacaatcgatttcaccatgatggcgtccagcgggtccgtgaggatgtcgcggacaaagcagccgtcaatcttaatgatatcggcctgtagatgtttcagacgttcatagttcgcatagccggtgccaaagtcatcaatagcgatggcgcagccaaacgcgcgcaacgcttcaagattttgccgactggtgtccgcattagagaaggcctgctcttcggtcacctcaatagttataagttctggcgagacgctatagcgttgaaacagcgcgataatctgccctgcgctgttcttttgcatcagagttgcaggcagcaggttgaccgagaatcgctggccgggatgcttatggagcatactgaacaaggtctccagcaccagcatgtcaaaacgttggctgaggttaaactgcacaatcagcggaatgaatcggtcgggcataatgacgctatcgccacagcgcatgcgcgtgaggatctcatgataaccctccccctccggattctgaatcggttgcgcatagagcatcagcgcgcgatctttgagcacttgcttgacgcgcattaggaggcgcacctgctcggtagtttgatccaccaccagatcctgctcctcgtccagcgccagcacccgacgttcactgcccgcctgttcggaaagccagcttagctggcccagcatctggtaaagtccctcaccctggccgtcatcgcggccccaggccgcgccaaactccaaatccagcggctgattgtgccagctgaactttttgtggttgaggaccgcgaccatatgattcaagcgggacgacggctccggtccatcaagcacgaggatcagttcgctgcccggtacctggaagactttatccgccgctcccagcagcggttgcagcgcccgaataatctgccgtttacagtccacccccatcatcagaccataatgccgactgagaaagtcgagattatcaatacgcaggctgcagatagcctgctgaggacagctctgtaaatggctctccagcgcgcgcaggttaggcaagccggtcagcggatcctcttccgcctggctacgccagcggcgtttgttgcggtcgctgcgggcatagatgtcggccatataaaacaaacagatagtaaaggagatcagaaccgacagcacaaaggagagtgaatactcgctttgcaccccctggagaaagtttttgttatataccaccagcaaaaaggccgagacagaccatgaaatacgcaatagcgcatggcctattcgactgataccgataaagtagacaataaaaataaccggaactaaataaccggcaataaattcagactgatacggcgcacacaatagcgttaatatcaccgccaacgcgataaaccaatatagggtaaaggagcgatattgcggtgccagccacggtaaacattcctgctgccagaaacgtcgggcgtagcgcggactgataatcatccgcattggataataaagaaacgtcgtaaaaattaatgccgcactgattaaactttggatatctattacagtataaatcaacggcatactaccaaagtaactggtaatagctaatggaaacgcaaaatattgtccggcgagatacatggtgattttcaggagcaccggcgcgaagaagccgccccagaagatccgcgcccccatatgctttgccgttggaccgcagcgccagcgcttccccaccaacagtcgcagaatagcgcaggagacaaacacggcgaacagttgacaaaaaagtaagataaacgcctgcggcagcgttaatttaatgagaaaactattggtgatggcaaacgcgagaattaatggcgcaattgcatagcggccaaagataaaaataacagaaaacatcacgctgattggcagccaggcaatataaataaggttgccgtcaattatcgtttgcggtgaaataaaacgagccagcggaatagcgactaaacaaatgataaaggccaatagagtttttttgatattaatgttaattttatcaagcattattgttaattaaaactccagaaacctcatcacgtttaatgggggaaatgttatgttgcttatttagggcaggcaaggcgaattatcaggaaaaagtctgaaattactttcgattttaattgctggagattaactgacgtaaccagaaagtgctttacatgaaacccgctaaaaacaaaaacccccgcggaagcgagggttctgaattttggtggagctaagcgggatcgaaccgctgacctcttgcatgccatgcaagcgctctcccagctgagctatagccccacaggacttctttacgaaccaaatccgctgggtgcagaatttggtggagctaagcgggatcgaaccgctgacctcttgcatgccatgcaagcgctctcccagctgagctatagccccgtaacgtaaagcgtgtcgtgttgacgggcggcataatatgaattcctcgctcaggtgtcaacggcaaaattatccttcccgattcaatcgctgaaaaagcaggcaacttgctgacattgcgagccttatcgcagtcagaagttaaacaggtcaccttttcacgtaaaaggatgctataacatgggcagctaattcccatacatttactcaggaaatagtatgctcaaggaacgaatgacacctgaagaaattgcccatctaaccggctacagtcggcaaactatcaataagtgggtgcggaaagaaggctggcaaacctctccgcgacctggcgtccagggcggcaaagcgcgcctggtccatgtcaatgagcaagtcagggagtttatccgcagcgcccagcgcgtggcggagacgcccggcatctattctccccatgatagcgatctggaatcgctgctgctgaccctcagtaaagaactcacccccagcgagcagaagcagcttatgtctttgttgctgcgcgaggggatcaccgggttactgcttcggttagggatccgcgatcggtaaaccatgatgaaactgaaagataaaatgacgcccgcagagcttgccgactgcctggggctggccagacaaacgatcaatcgctgggttcgcgagaaacaatggcgcaccgaagcaatacccggcgttaaaggggggcgagcgcgactggtggttatcgaccaaccggtacgcgagtttctgaccaacatccctgccagacgccatctgcttaccgacaatcatctcgcggaatcgccaggtgcatacctggtcaatgaggcagacgcgatctggcggcaaatcacggaaaccctacagctgatgactccggcagaacagctgcagctccgcgatctgctggcccgggaagggattagcggttttcttgcccgcctcggcatcgccagtccggaataacaggcaaaaaaaacggcagggtaacctgccgttgtttcagctgcgtcgccgtcaggacgcctggccttcgcgttcagcgataaaagccagcgctttattgatacgatctacgctacgggatttaccgatagcatggacagtaacgtctagcgcaggagattgccctgccccggtaaccgccacgcgcagcggcataccgactttacccatccccacctccagctcatcagcagttgcctgaatcgcgtgatggacgttttccgccgtccagtcgctaatcgccgccagcttatcgcgaaccacttccagcggctgacgcgccactggacgcagatgttttttcgcggcgtcgacatcgaattcagagaactcttcatagaagtagcggcagctctgggccatctctttcagcgtcttgcaacgctcgcccagcagtttcaccagctcagccagctgcgggccgttgcgagtgtcgatattttcctgctcgatatgccactgcagatacgttgccacatactccgccggcagggtattgatatagtgatggtttaaccacagcagtttatcggtgttaaaggcactggcggatttgctcaccgcgcccagcgaaaagaactcaatcatctcttcgcgagtgaaaatctcctgatcgccatgagaccagcccaggcgcaccagatagttgagtagcgcttccggcaggtagccgtcgtcgcgatactgcatcacgctcactgcgccgtggcgcttggaaagttttttaccgtcatcgccgttgatcatcgacacgtgcgcataaaccggcaccggcgcattcagcgctttgaggatgttgatctggcgcggcgtgttgttgatatgatcttcgccgcggatcacgtgagtgatcgccatatcccagtcatctaccaccacgcagaagttataggtcggggaaccatcggtacggcgaatgatcagatcgtccagttcctggttgctgaactcgataggtccgcggatctgatcgtcaaaaataaccgaaccttcctgcgggttggcgaaacgcacgacgcacggctcatcgtcagcatggtgctcgtggctatggcggcagcggccatcgtaacgcggcttctcacccttcgccatctgctcttcgcgcagcgcttccagacgttctttcgagcaatagcatttgtaagcggtaccggcttccagcatctcatcgattacgttgttataacgatcgaaacgtttggtctggaaataggggccttcgtcccattgcagattcagccagttcatgccatccatgatggcttcaattgcttccggggtggagcgttcgagatcggtgtcttcaatacgcagcacaaactcaccgccgtggttacgggcaaaaagccaggaatagagagcagtacgcgcaccgccaacgtgcagatagccggttgggcttggcgcgaagcgagttttgattttcatgaattggccttacgtttaataaagatgccgatagccggcaatgtccggtggaaattatgggtcaatattctaacaccgtgggctgattcctcaatgttgttcccatcggaacgtcacggtttgccatttttgtttataaatcatgctatggcgccggtttcgcgatcgctttgtttaattttacgacgaacgaacgaattctttagaaaaggcgttgactcattttcaactctccctataatgcgactccacacagcgggggtgattagctcagctgggagagcacctcccttacaaggagggggtcggcggttcgatcccgtcatcacccaccactacttaacgtagtctccgccgtgtagaacagaaaattgagaagtgggtgattagctcagctgggagagcacctcccttacaaggagggggtcggcggttcgatcccgtcatcacccaccactttctcgccagctggattttctgtcaaaatgtgaagtaccgaagtgggtgattagctcagctgggagagcacctcccttacaaggagggggtcggcggttcgatcccgtcatcacccaccacttcgggtcgttagctcagttggtagagcagttgacttttaatcaattggtcgcaggttcgaatcctgcacgacccaccaatgtaaaaaggcgccctaaaggcgcctttttgctatgcgcggaacatggccctgccacgagaccctccgcagcaatcccccctgtcagcgctgatatagcggatcttcaaccctggcggcggttaaattctccccttcttcacgcacaatttcccataacgcctgagcggcggtcgacagcgagcgatttttcctgcatgccagcatcagctgccgctccatcaccggagtcagccgtttcaccgtcagatggctcccctgcggtaacggtagcgccagcgccggcagaacgctgatgccaattcccgattctaccatcggaaacagcgttgccgggtggccaatctcctggacgatgttcgcccggatagccagtctgctgagggccgcatcgatcagcgggcggctgccggacgcataatcctgcaggattagcctttcatcctgcagcgcctgccacggcacttctgtcaggctggcaaaaggatgatcctcccggcagagcagcaaaaatggttccgccagaaccacttcacactgaaggtctgccgccgggcccggatcaatcacgatgccaaaatccacttccccctggcggatactctccagcacccactgctggggccgatcgtgcagcacaaaatcgatatcgggataacgacgattgctgtgagcaatacactgcggaataaggtgggcggaaatcgtctgactggcggcgaccttgacggtgccgctcagctgctggcctacccgcccggcgtcacgcagggtaatcgtcaactcatcaagcaaacgttccagcctgcccgccagctgctgacccgcctcggtgagcaccacttcgcgagtagtacggtcgagcagacggacgccggtctgatgctccagctccttgacgctatggctgacggccgactgacttaagccaatcatctcccctgcccggctgaagctgctggcccgggcgacggtgacaaatacttttaactgacgcagagagtaattcatcttttttattcatgaatagatgcaataaatcaattttatttctcaaatgaaaaaaagcacaatagcgcatctcttttcaggagcgtttatgaaacttttccgtattctcgatccgtttacggcaacgctaatcaccgttgtcctgctggcctcattcttcccggcccgtggcgctttcgtccccttctttgaacatctgaccaccgccgccatcgcgctgctgttctttatgcatggcgctaaactctcccgggaggcgattatcgccggcggcagccactggcgtttgcatctctgggtgatgtgcagcacctttattctcttcccgctactcgggttctgtttgcctggtgggcgccggtgaatgtcgatccgatgctctacagcggctttatctatctgtgcattctgccggccaccgtgcaatccgctatcgcctttacttcgctggccgggggcaacgtcgcggctgcggtttgctcagcctcggcctccagcctgctggggatctttgtttccccgctactggtgggggtcctgatgaaccttcacggcgcaggcggcagtctggagcaggtcggtaaaattatgctgcagctgctgctgcctttcgtgctcggtcacttatcgcggccgtggattggcgactgggtggcgaagcataagaagtggattggtaagaccgaccagacctcgattctgttggtggtttactccgcctttagcgaggcggtggtgaatggcatctggcataaagtcggtctgggatcgttgctgtttatcgtggtggtcagcctggtgctgctggccatcgtcatcgcggtcaacgtctttgtcgcccgccgctgcggctttaacaaagccgatgagattaccatcgtcttctgcggttcgaaaaagagcctggccaacggcattccgatggccaatattctcttcccgacctccatcctcggcatcatggtgctgccgttgatgatcttccaccaaatccagctgatggtctgcgcggtgctggcgcggcgctacaagcagcaaaccgatgcgcgtctcgctgaggaaaaggccaacgcggccaaagcctaacgcgctttcttcaggggctggacctgatcgctcagcccctcagttttaatcagcagggtcaacgccatcagctcgccaagatgcccggcagggaattgatccttacgcgcgaaccacaataaatactcttccgggacatcgattaagcgacgtcccttgtatttaccgaacggcatttcggtattggctatctcgaccagctgcgctttatccacgttattctcccagcagacgcatcatttcggcttcgtcaatcacctcgatgcccagctcctgcgctttcgccagcttagaccccgccgcttcgccggcaatcaccaggtcggttttcttcgacacgctgcctgccaccttcgcccccagcgccaccagacgcgctttggcgtcatcgcgcgacagctggctgaggctgccggtaaggaccacggttttgcctgcaaacgggctatcaatctcttccgccttcaccaccaccggcgcaggccagcgaaccccctccgccagcagttgcgcaatgacatcgcggttgctctcttcggcaaagaagttgaaggtatgggtagcgacgacgatgccgacatcagggactttctgtagctcctcaatggaagcctgctccagggcttcgagagtgccgaaatgcgccgccaggcccgccgccgtcgcttctcctacctcgcgaatacctaaggcgtagaggaagcgtgcgaaggtcgtctctttggctttctcgagggcgttgactacgttttgcgcggacttcggccccatccgatccagcccggtcagtttccccgccgtcagccggaacagatccgccggggtatggacgtactctttctccaccagctggtcgatgatcttgtcgcccatgccgtcaacgtcgagcgcgcgacgggagacgaagtgcttgagcgactctttgcgctgcgcgccgcagatcaggccgcccgtacagcgggctaccgcctcgccttccacccgttcaacgtctgactgacatacaggacagtgggtcgggaagacgacatcccgggcatccgccggacgctcggaaagcaccacgttaaccacctgcgggatcacatcgcctgcccggcgaatcaccaccttgtcgccgattttcaagcctaagcgttcaatttcatcggcattatgcagggtggcattgctcaccaacacgccggcaacatggaccggctccagacgcgccaccggcgtaatcgccccggtgcggcccacctggaactccacgtcccggacgaaggtcatctgctcctgtgccgggaacttaaaggccacggcccagcgcggcgcgcgggcgacgaaacccagctgttcctgcagcgccagcgaatcgactttgatcaccacgccatcaatgtcaaagcccaggtggggacgctcttcctcgactttacgatagtaagtaagcacttcctcgggggtatggcacagggtgacgcgatcgctcaccggcagcccccatgctttgaactgcagcaaccgagccgagtggctggccggcagctcgccgccctccagcacgcccacgccgtagcagaagaaagtaagcggtcgcttcgcagtgatgcgcggatcgagctggcgcagcgaacccgctgccgcattacgcgggttagcaaacactttcccgccggtgcgacgagcttcctcattgattttttcaaacccggcctgcgggaggaacacttccccacgtacctcaaggcgtgcaggaatattctcgccatgcagcttgagggggatggcgcgaatagttcgcacgttagaggtaatatcttcgccggtggtgccgtcgccgcgggttgccgcctgcaccaacacgccgttttcgtagagaatgctcaccgcgaggccgtcgagcttaagctcgcagcagtaggtaagatgatctgtgcttttcaggcgatcctgtacccgcttgttgaaggcgagaaagctctcttcgtcaaacacgttatccagcgacagcatcggcacttcatggcggatctggctaaaggcggtgagtggcgccgcccccaccctctgtgttggcgaatccggggtaatcagctccgggtgctggctctccagctcgcgcagcttgcgcatcaggcggtcatattccgcatccggcacttccggcgcgtccataacgtggtacagatattcatgatggcgaagcgtggttcgcagttcagtcagttgttgttcgattggttccatatcacaccatcaatgataaaaaacccccgacaggcgggggttgagaaaggattgagttaacgcggaacgtcaggcgttcgcgtctttcacttcgcgaatacgatcctggtattcacgcagtttttgcggcgtcatcatgcgacgctgatcgtcaagcaccacgccgcccacttcgtcagcgatatactgcgcagactgcagcatcagcttgaagttctgcagttcatcgccgtaggaagggacctgcataaagatagtcaccccaggggtcatcatatccgccatgctgtccggattgaaggttcccggtttcaccatgttggccagactgaacaacaccggaccgctgccgtccggacttaggtggcggtggaaaatattcatttcaccaaacttaaagccggcctgctggatactgttgatcagcacttcaccgttaagctgggcgccatgatgcgcggcgacgttcatcacaatgaccgtctctttgcgctctttcggctgcggcgcggcgggctgctgcggctctaccggctgcggttccgcgacggcgggctgcgacgcggcaacaggctgtggcgcaggctgctgcggggcggctggctgcggctgagcgacggtcggcgtcaccggttgcggcgcgacaggctgctgcacaacaggctgcggctggtgttgcggttgtacgggcggctgcgcaggttgcggctgttgccagccagtctgcggagccgcatgcggcgcaggctgttgctgcggtggaaccggggcctggcgcggcggctgcggcggctggcgaaccggttcttcaggacgcgcaggctgctgcatctggcgctcgtaaggcggctggtactggtgctgcggcgcctgacgaggggcttcatgctccccatgcgcgccgtgcggggcgtgagtcaccggatgaacgcggacttctcctacgccttcaacattatcatcaaagtcgtcgttttccgactcatcgtcgcgcgacttcatacgtttcagtgggcgatcgcgaaacatcgaagaacgttctttacggctggtccagaaaccatgtaccagtaaagcgattatggcgatcgcgccaacaatgattaatatcagacgcaaatcctgcatcattatattctctgttgttctaacaccttgccaccacggcaaacatttactcactaagagtatttgccgattacctcaagtgcaagtgcgtcggtcgctttcaccacataaagatgaactaaatcgtgctttttgctgttttttcgaacatttcctaactggttattgtctgacgacccgataaaataagcgagcattcacaccggatgttaaaaaaggagcaatgcctggctatggtttcatcatccgcaccgaccccgcgcagcggcgtttattatttttcgcagggctggaaactcatcgggctgccgggcatacggcgttatgtcttcctgcctttactggttaacgtgctgctgatgggcgctgccttctggtggctgtttacccgtctcggcagctggatcccctcgctgatgagccatgtgccggactggctgcagtggctaaactacctgctgtggccggtggtagtgctatcaatcctgctggtgtttggctacttcttttcgacgatcgccaactggatagccgcgccgttcagcggcctgctggcggaacagctggaagcgcgcctgaccggcgctaccccgccggacgtcggcgtctttggcatcatgaaagatattccgcggattatgaagcgtgagtggcagaagctggcctggtatctgccgcgcgccatcgtgctgttgctgctctactttattcccggcgttggccagacggtagccccggtactctggttcctgttcagcgcatggatgctggcgattcaatactgtgattatccctttgataatcacaaggttcccttcaaaaccatgcgcgaagcgctgcgcagtcgcaaagtgatgaatatgcagtttggggcgctcaccagcctgttcacaatgatcccggtgttaaacctggtgatccttccggtggctatctgcggcgccaccgccatgtgggtcgattgctatcgcgatagacacgccagctggaaatagcggtaacaccttcacttgggggcggcaaaggccgctcccttatatcgcgcttattccttcttgcttatcattatttcccttccgcatatagatatgctaaatccttacttccgcatattctttaagcgggtatgctgatgccgtacccccaaatttcatacagttaaggacgggccatgagtaagatttttgaagacaactccctgactatcggtcatacgccgctggtacgactgaaccgcatcggtaatggccgtatcctggcaaaggtagaatctcgtaacccgagctttagcgtaaaatgccgtatcggcgccaatatgatctgggatgctgaaaagcgcggcgttctgaaacctggcgtggaactggtcgagccgaccagcggcaacaccggtatcgccctcgcctacgtggcggcggcccgcggctacaaactgacgctaaccatgccggaaaccatgagcatcgagcgtcgtaagctgctgaaagccctgggcgccaacctggtgctgaccgaaggcgccaaaggcatgaaaggcgctatccagaaagcggaagagattgtcgccagcaacccggaacaattcctgctgctgcagcagttcagcaacccggctaacccggaaatccacgagaagactaccggcccggaaatctgggaagataccgatggtcaggtggatgtgtttatctccggcgtaggtaccggcggaacgctgaccggcgtcagccgctatatcaaaaacaccaaaggtaaaaaagatctgatcaccgtcgccgttgaaccgaccgattccccggtgatcgcccaggcgctggcgggggaagagctcaagccgggtccgcacaaaattcagggtatcggcgccggcttcattcctggcaacctggatctgaagctggtcgacaaagtgatcggcattaccaacgaggaagctatctccacggcgcgccgcctgatggaagaagaaggcatcctggcgggtatctcttccggggccgccgttgccgccgcgctgaagctgcaggaagatgaggcctttaccaataagaatattgtggttatcctgccttcctcaggtgagcgttatttaagcaccgcgctgttcgccgatctcttcactgagaaagagctgcaacagtagtgccagcttgtaaataatgtgtaaaaaagcaccttttcgggtgcttttttgtggcacacgtcaaagttttacccctcctggcattgattcacctcgtagggtctggtatttaaccagcacatttattttgatgcgcgaaattattcagaagaggatttccgccagctgaatcgattttatgatttggttcaagtcttcctttcgcggcataatgtttaatgacgtgctagacgtcaatggcccgcaggtcttcgcagcgccaggcgctgccgacgccaaggccggaaacgtaacgccggcgctaacaatacaggctaaagtcgagtcgttagactagactttaggtccacaacactaaacctataagttggggaaatataatgttccagcaagaagttaccattaccgctccgaacggtctgcacacccgccctgctgctcagtttgttaaagaagctaaaggcttcacttctgagatcactgtaacctccaacggcaaaagcgccagcgccaaaagcctgttcaaactgcagactctgggcctgacccagggcaccgtagtgaccctctccgctgaaggcgaagatgagcagaaagctgttgagcatctggttaaactgatggctgaactcgagtaagttcacgggttctttttcatatcagtcacaagtaaggtagggttatgatttcaggcattttagcatccccgggtatcgccttcggcaaagcattgctgctgaaggaagatgaaattgtcatcgaccggaagaaaatttctgccgataaggttgatcaggaagtcgaacgtttcctgagcggccgcgccaaggcctccgcccagctggaggtcatcaaaaccaaagctggtgaaactttcggtgaagaaaaagaagccatcttcgaagggcatattatgctgctggaagatgaggagcttgagcaggaaatcatagccctgattaaagataagcacatgactgccgacgcggcagccaatgaagttatcgacggtcaggccactgccctggaagagctggatgatgaatacctgaaagaacgtgcggctgacgtacgtgatatcggtaagcgcctgctgcgcaacatccttggtctggcaatcatcgatctgagtgcgattcaggatgaagtcatcctcgtcgccgccgatctgaccccgtctgaaaccgcacagctgaatctgaaaaaagtgctgggtttcatcaccgatgcgggcggtcgtacctcccacacctctatcatggcgcgttccctggaattgccggccatcgtgggcaccggcagcatcacggcgcaggtgaaaaacggcgactatctgattctcgacgcggtgaacaaccaggttctgatcaacccgtctaacgagcaaattgaagcgctgcgtagtctgcaggctcaggttgcggaagaaaaagccgaactggcgaaactgaaagatctgccggcgattaccctcgacggccatcaggttgaagtctgcgccaacattggtaccgttcgcgatgtcgaaggtgctgagcgcaacggcgccgaaggcgtaggcctgtatcgtaccgaattcctgttcatggaccgtgacgcgctgccaactgaagaagaacagtttgcggcttataaagcggtggctgaggcctgtggctctcaggccgttatcgtccgtaccatggatatcggcggcgacaaagagctgccgtacatgaacttcccgaaagaagagaacccgttcctcggctggcgtgccgtgcgtattgcgatggatcgtaaagagatcctgcgcgaccaggttcgcgccatcctgcgtgcctccgctttcggtaagctgcgcattatgttcccgatgatcatctctgttgaagaagtgcgtgcgctgaagaaagagatcgaaatctacaaacaggaactgcgtgacgaaggtaaagcatttgacgaatccattgagatcggcgtgatggtggaaacaccggctgcggcgaccattgctcgtcatctggccaaagaagttgatttctttagtatcggcaccaatgatttaacgcaatatactctggcagttgaccgtggtaatgatatgatttcacatctttaccagccgatgtcaccgtctgtactgaatctgattaagcaagttattgatgcttctcacgctgaaggtaaatggactggcatgtgcggtgagcttgcgggcgatgaacgtgctacacttctgttgctgggtatggggctggacgaattctctatgagcgccatttccatcccgcgcatcaagaagattattcgtaatacgaacttcgaagatgcgaaagtattagcagagcaggctcttgctcaaccgacaacggacgagttaatgacgctggttaacaagttcattgaagaaaaaacaatctgctaatccacgagatgcgcggcccaaattactgcttaggagaagatcatgggtttgtttgataaattgaaatctctggtttctgatgacaagaaagacaccggaactattgagattgttgctcccctctccggtgagatcgtcaacattgaagacgtgccggatgtggtttttgcggaaaaaattgtgggcgatgggattgccatcaaaccgactggcaacaaaatggtcgcgccggtagacggtaccattggtaaaattttcgaaaccaaccacgcgttctctattgaatctgatagcggcatcgagctgttcgttcacttcggtattgataccgttgaactgaaaggcgaaggcttcaagcgtatcgctgaagaaggtcagcgcgtgaaagtcggcgatccggttatcgaatttgatctgccgctgctggaagagaaagccaagtcgactctgacgccggtggttatctccaacatggacgagatcaaagagctgatcaaactgtccggtagcgtgaccgtgggtgaaaccccggtaatccgcatcaagaagtaatgcttgctgcataaaaatggcgccgaaaggcgccatttttttataccgcgcaggttaccggtcgatagcacttctcgcgggacaagacgcgcaatccctccggggtgctctccagaattcgccgctcgctgtcagcgaccagcagttcgcactgatatccaccggccaggccgaacagcgaccgcgccacgcaggcatcctccagcgccgcctcacctgtcgtatcaaaatgaccaacaatgcgtccctgctggcggatcactaaccgatagcttttcatctgctttgctccagcggcggtaggatcaattcgtcacacccctgggcggcagtccagttcatcacctccagcacgcgctgggcagcagcctgcgtcgctgcccccagcgccagtccggaaagcaacccgctcaccagctccgcgcagaacagatcgccggttccttttaagtctgtctccacccgcgggtgaaccaccacttccactgcatcggccgtcaccaccagcacattgatcgtcgaatcggcctctcccggcgcgctggtgatcaccacccatttgagggtgtccgacagcaggcttcgcgccgcggcgaccgcctcctgccgatcgcgacagcgctggccgctcagcgtctccagttcgaacagattgggggtgatcccttgcgccagcggcagcaggtgctgacgataggcgtccgggatctcagccttgacatagatgccactgtcgacatcgccgatgaccggatccacgagaatgcacaacccgggatggcgggcccgtacgcgcgtcagccactgcgccaggcgttcgatttgcacagcgctgcccatatagccggtggtgaccgcacgcagttcgcgcagcgcgtcgcgctcctccagcgcctgcagatacccgacaaaccactcttccggaataatgccgccatagaacgtctcataatggggcgtattgctgaacagcaccgtcggcaccgccagcacgcgcagaccatgctgtttaatcgccggaaccgcgatgctgttgccgacgctgccatagactacctgcgactgcacggcgacgatatccacttccgacgcccggcttttgtcgtgaaagagcactgattgtatatcatcctgctggcccatcttttctcccccgctggacagcgggtcacgcactgattatgattcgtcctatgctaaattccattttgtcataggtcaataatgttagccggaaaaaccgccagcgaaatcttcgataacatccgccatctggtgcagagcggcgggttgcagcccggagaggttctgccgccggtacgtgaactcgccagccagcttgcagtgaatcgcaacactgtcgccgccgcctataaacggctggtgacctccgggctggccgtcagtcagggacgcaacggtacagccattaaagcgcgggacacactgccggcgctggagggaggtgacccaacgaccccgctgaacgatatctccagcggcaatcctgatccggccagactgcctgatttaccccgctatctgggacagattgcccgcacgccccgcctgtatggcaatgcgcccatcgagccgcggcttggccaatgggccgaggcgtggtttgccagagagatagccgttccctttgcggtgaatctcgccagcggggcgatagacgccctggagcgcctgctgtgcgctctgctgctccccggcgacggcgttgtggtggaagatccctgttttctcagcagcatcaatatggtgcgttacgccggttttaccccctgcccggtggcggtggatgccgaagggatggatcctgacggcctggaggaggcgttacgcaacggcgcacgggcggtgatcttaaccccgcgcgcgcataatcctaccggctgtagcctgacggaaacccgggcgcatgccctgcgggaggtgctagcccgctatccgcaggtactggcgattgttgatgaccattttgccctgctgtcggccacgccatggcactcccctcttcctgcaagcacccaacgctgggcgctggtgcgctcgatgtcaaaaaccctcggaccagacctgcggctggcctttatcgccagcgatgccgctacttcagcggcgctgcgcctgcggcttaacgccggcagccagtgggtcagccatctgctgcaggacctgacgctggcctgcctgaccgacgaggcgtttatcgcctcgatgacggagacccgtcgtcactatcgccagcagaatgagaaactggcggcggcgctggcccggtacggctacagccatgctacgccaggggatggcctcaatttctggctgccgctgccagcggcgagccagccctacgccttacgcctggcccgcgccggctggctggtccgggagggagaggtgtttggcatccgtacgccctcccacgggctacgcctgtcgctgggccgtctgagtgacgctgagatttcccgcctggcggccgatattgcgcaggccttagacgccccctgacgcaggcagtccaccgaacgtatcggggagtgatggcagctgccgacaaattaatgaaaaataaacgacaacaggctagtctttcctgcatgccctgatcgccgaggcggaaaaatcgctcacaacaaggagcaccagagatgcatcaccctgacctggcactgaaagcggtcattgaagcctgcgatcgcgctatctcgcaggaagattacgataccctgatgagttattacgcagaagacgccgcgctggtcgtcaaaccgggcatggtggtcagagggaaagagaatatctgcaaagtctttatcgccattgccgactatttccagcaccgactggtggtgactcaggggaaaatggaggttattgaaggcggcggcaatgcgctggtgattatggagacccggctggatatcccgacggcggacgggatatccaaggtcacgcgacgcgccacctatgtctttcagaagcagggcgaacgctggctgtgcaccgtcgataactcctacggcaccgacctgcttgatgattaaatgcccgccccctggctaaagtgttcttcgccgaacacgccggtggaaaggtaacgatcgccgcgatcgcagacgatcgccaccaccaccgcgccaggattttcgcgggctatgcgtaacgcgcccgctaccgcgccgcccgaactgacgccgcagaaaatgccttcccgcaccgccagctgacgcatggtgttctcggcatcctgctgatgaatatccagcaccgtatccaccagcgaagcgttaaagatccccggcatatactctgccggccagcggcggatcccgggaatactgctcccctcctccggctgcaggccaacaatggtcaccggtttactctgttcacgcagaaaacgtgacacgccggtaatggtgccggtggtccccatactggagacaaagtgggtgatacgccccgcggtctgctgccagatttccggcccggtggtggtgtagtgggcgtaggggttatccgggttgttaaactgatcgagcagtttgccttctccgcgctgggccatctccagagccaggtcgcgggcaccctccatcccttgctctttgctgaccaggataagctcggcgccgtaagcgtgcatcgcggcccgacgctcctggctcatgttgtcgggcatcagcagcttcatccggtagcctttcagcgcggcgatcatcgccagcgcaataccggtgttgccgctggtcgcttcgatcagcacgtcgccgggctgaatttcgccgcgcttttccgcttcgacgatcatcgacagcgcggcgcgatctttcaccgagccggccggattattgccttcgagtttgacccacacttcgctgccgttgtccggtcccagacgctgaagtttgaccagtggggtattgccgatggtttgttcgagtgtattcacgatttttactcaataaaaaagccgggcggcgcttcgcttacccggcctggcagacgcgtgataattccagaccgggtaagcagagcctcacccggcaaaagcacatggatttaagctatcaggccgactccgccagagcaagctcgccgcgcggctcgatacgctcggtaccgttgtacaaacgcgcgttttgcagcccgacgaacagccgttcgccgcgggacggcgcctcgtcgcccgttaacaccacgctcagcggttcgtcataccaccccagaggctggacgactaattgggtgtagtgccctttcggactggcctccaggacctgcaccggcagcggcgaatccaggctggtccgccggctgatgtccacttcccacgggcgcaggaacaggtccactggcccctggtatgccggggtatagcctaacggccagcggtgggcgccgacgtggaactgtccaccgcggatgaccccctgcaggcggttcacttcccccataaactccagcacgaaacgggtagacggctcacgccatacgcgctccggggcatcggcctgttcgatgttgccctggctcatgaccaccacccggtcggcaacttccatcgcctcttcctgatcgtgggtgacgaacacgctggtgaatttcagctcttcatgcagctgacgcagccagcggcgcagctctttacgcacctgcgcatccagcgcaccgaaaggttcatccagcagcaaaatttgcggctccaccgccagggcgcgcgcaagcgccacgcgctgcttctggcccccggacagctgcgccggatagcgatccgccagatgggccagctgcaccatctccagcagtttggtcaccttggctttaatcgccgccgcattggggcgttcgcggcgcggcagcacggtcaggccaaaggcgatgttatcgaacaccgtcatatggcggaacagcgcatagtgctggaaaacgaagcccactttacggtcgcgagcgtgcatccgactgacgtcggtaccgtggaagcggatatgaccgctggtctgatgctccagaccggcgataattcgcagcagggtggtttttccggagcccgagggccccagcagcgcaaccatttgtccggaagggatatccaacgagatatcattcagcacctgggtgcgaccaaacgatttcttaatattggcaatctcaatgctcatgatttccctcctgttgcgcgcgttctttctgattggccagacgccattgcaacatactctttaaaaacagggtcagaatagccattaacgtcagcagggcagcggcggtaaacgagccgacggtgttgtaatcctgctccagtagttcaatttgcagcggcagcgacagcgtttcgccgcggatcgagccggaaaccaccgacaccgcgccaaattcgccgatggcgcgggcgttggtcagcaccacgccgtacagcagcgcccagcgaatattgggcaacgtcacccggcggaacatctgccaaccggacgcgcccagcagcaccgcggcctcatcttcatgactgccctgactcatcatcaccggcaccagctcacgcaccacaaacggacaggtaacaaagatggtcgccagcaccatgcccggccaggcgaacatgatttgcagattatgcgcgtcaagccagccgcccagcggaccgttagagccgtaaaacagcagatacaccagaccggcaaccaccggcgagacggcgaacgggatatccagcaacgtcagcagcagctggcgccccggaaaggtaaaacgtgtcaccagccaggccagcaaggtaccgaacaccaggtttaccggtacggtaatcaacgcaatcatcaccgtcagccagatggcatgcagcatgtccgggttcgccaggttttccagcaccggcatcaatcctttgctgaaggcctggataaagatgtagagcatcggcaccacaaggatgaaggcggagaccagcatcccgacgccaatcagaaaccattttccccagttgatacggggcgcgtcgtagcgtttcaattgagtaacttccgccattagtgacctaccacgcgtcgaccaaagcgactctgcagggtattgatggaaaacagcagcagcagtgaggcggccaggatcaccgaggcgatggcgctcgccgccggatagtcaaactcctgcagacgaataaagatcatcagcgacgttacttccgtcttccacgcgatgttgccggcgataaaaatcaccgcgccgaattcgccgaggctgcgggtaaacgacagagcaatgcccgccagcagcgccggcgacagctccggcagcaccaccttgcggaaactctgccagcgcgtggcgcccagcgtttccgccgcttcctcatactcgggccccaactcttccagcaccggctgcacggtgcgtaccacaaacgggatgctggtgaaggccatcgccacggcgatgccgagccaggtataggtgactttaatatcgaacttcgccagccattccccgtaaataccgttcaccgaaaacagcgaggccagggtcagaccggctaccgccgtcggcagcgcaaatggcaggtccattaaggcatccagcagcgtgcggcccggaaaacgatagcgggtcaggatccaggccatcagcagaccaaagacgccgttaaaaatcgaggccacaaacgccgacagcagcgtcaccttataggcagccaccacctgcgggttggtgatcacatcccagtactgcgcccaactcatctgcgccagctgcatcaccagcgcgctgagcggtaataacaaaatcagacagacaaacagcaggctggtgccaaggctcagggtaaaacccggcagcacgcgcttggacgacacagcaaacattacttacgccccgccgccagcagtttgtccagttcgccgccgctggcgaagtgggttttcatcacctcaggccaggagccaaacttatcttccacgcggaacagctcggtctgcgggaatttatccttcagagcatccatcactttcgggttgtttacccgatagtagtagtcggtaatgatagtttgcgcctgtggcgtatagagccagttcaggtaggctttcgccgccttttccgtgccattggctttgacgtttttatcgacccaggctaccgggaactccgccagaatgttggttttcgggataaccacttcaaatccctgcgcctcatactgcttgcgaatattgttcacttccgattcgaagctaatcagcacatcgccgaggccgcgctcggcgaaggtggtggtcgctccgcgcccgccggtgtcaaagacttcgacgttcttgagaaactgagtcataaactgttcggttttagctttatcgccgccatcagctttatccgccgcgccccatgccgccaggtaggtgtatcgggcgttacccgaggttttcggattcgggaagatcagcttaacgtcagagcgaaccaggtcgttccagtcatgaatgtttttcggattgcctttacgcaccaggaaacccatcgtcgaatagaacggtgagctgttgttcggcagacggctttgccagtcggccgggatcaggttgcctttgtcatgcaggatctgcacgtccgtcacctggttgtaggtgaccacgtccgccttcaggccctgcaaaatagccagcgcctgcttggatgaaccggcatgcgactgcttgatggtcagcttgtccccgccattgtctttcgcccactgctgctcaaaaggcgggttaagggcggcaaacagctcgcgggagacatcataggagctgttcagcagctccgtcgcctgcgtctgcgccaccagcagcatggaagccgccagcgccagatatccttttttcagtgatttaacggccattgcgcacccttatcaacgttgaacattttctgatgatcatcatatttataacgggtacgaaaggagtaacggttttatataccgtttggcgatttggaagtcgaaaagggaataagcaactggcaaagcttagctgaaagcggctcgcagattagacgggtcattgtgacaaacggcagccaggcgtgcactgtgtttatatgaaaaacacacagatatttgctcgtcagctcagacgtagcttaacgcccgcagaacgtcgaccagggtactgactgggcaaccgccgttttgctagcgatacgtttcgccgccagcgccccgttgccccctatattctcgatttcgcctgctgcgcaatacggctggcgattgaactggacggcggccaacacgatgacgccgcacccgctggcaacagagcgagggatggcgagttttacgcttctggaataatgagtttgaagagcatgaagatgcggtgatggaggcgatacttgaagcacctgagccgccaatgccctcacccctcccctctgactgagggagagggagtaaaagaatccgcacgcagatcccatagccgcaccttaccgtcccctctcccctttggggagaggggacgggtgagaggaaaaattacagcgcctggatacgctccagcgacggcgcgaagtaatacccgccggtcaccggtttggtgaagcgcagcatcgcgtcgcgtttaccgtcggtatcgccaaacatgctcagcagctgctgctcgatgttatacaggcgcgcgcagtaggcgcagaaatagaggccatgggtgccgctggcggtgccgtacggcaggctctgacggacgattttcagccctttgccatcttcttttaagtccacgcggctcaggtgcgacgtgaccggacgttcatcgccatcgatctcttcgttagcgtctttagtacggccgatcatcatctcctgatccggcacgctcatgcggttcagctgtttgagattatgctcccagcgctggacgaacacgtagctgccgcccgcatccacgccgtctttaatgaccgccacttcgcggcgggtttcttcccccgccgggttttcggtgccatcgacgaagccgctgaggtcacgctcttccacccagcggaagccgtggatctcttctttcacgtcgatagcgtcgccaaaggcggccagcgcggcctgcgccaccgagaagttaacttcatgacgggcggataaaatatgaatcagcaggtcatactgggtggacggcgccagccctttgccatagaccgggaaatcttttaactcatccgccccttcgccgccgctcagctgacgccagacgttattgccgaacgccaccaccgcaccgagtttggcgtcggggaatttagcctggaaggtggccacgttatcgacaaaaattttgctcgcttcgcgcagggcgttaacgtcccctttgagattggcttcaatccaaatcgccgcgcggcaatgttccggcaaaatgccgctctgaacctgagacatcgctcctcctgaaatgatgcaaccacaacgctgtcgcgttgctaacgcgccattgtaaccgtttttcagagctgtcgtgtctcttcagatcaatttagcgacgccagataatcttgctgaccttccagtttttcagcgtatcgtcggagggcatcagctcgtccggaccgctccagtggccagtgaaggcatagctgatatgctggctcccctcggcctgacactcgacgaccgccccgttgtcatggctgcctttctggcagttgccgaaggctttgctgtacaggtcgctaaacggtgtgccgattttcacgccgctggcggttttgatatccgcatcacgcacgtcaatccggctgatagcaccgttgtcgccattgatggtcagcgccacgctgttgtttttcagcgcttcaaagtagtggacgatattgcccttatcggtcttcattccgctgcgtaaacggtagtcgctgcccagcgcatcgctaatcgcctgttcattgagcggcgtggaggccgtcagtttacccactccctgctcggtcacctcggtggaagcgccaaaccagttccacggataggccgccgaccagttgactgcgctcatcgtggagcagccggtcagcgccagcggaagcgcacagagcattacacgtagcgatttcatatctcaatcctttctgagtcattcaacgcatgttggagttcacgatcggcaaaaagtgccattaaaaggtggtctggtgaaaacaggcgcccaggcgacggctggttaacagccaccacagggcatagccatccgcgaccagcagcgcaatggtcaacgaggagggagattcgccgctcagccatagcatcggctgccacagcaacagcagcacttgcgatagcaccagcagccagcgcatcgcccgccacaggcgcggcaggcgctgacgatagccgctaagcagaaaggccagcaccgccggcacgcctggcagtaaaccaagccagaagcgctcgtgatcgggatagaacagattaagaatcgcgtcgccctgctggcgcgatgcgccggctatcaaaaacagcacccacgtgcgggcctgcaacaacagcacgcaccagaaaagcaaaggcaggcgcagacggccatgggcatcaaaatcggcggggataaactcagtattcttcatcttcgatcaggcgcttgcccagggtcaggacatcggcgtactcatagcccaaccgctcgtacattccctgcaccacgtcgttgtcttcacggaccataatgttgattttcgggcagccgcgggcaatcagctttttctccagacggttgagcagcgcgttcgcgataccccggccgcgatattccggatggacgccgagataataggccgatccgcgatgaccgtcatatccgcccatcactgtgccgaccacttcgccattcacttccgccaccagaaacaggctgacgtcgtgattcagcttgcgctcaatatccatctccggatcgttccacgggcgcaacagatcgcagcgctcccacagcgtcacaacctcttcgaaatcctgctggcgaaaaacgcgaatctccatggtattccccaccattgacggttaaaaacagtgattatggcgcgaatataactgatagccaatatcaggcgaaatcagcgacaaaaaatggcataatatgactttgtcatgtattgaaatgaaaagtaaaacaattcttattttgaatggtcgtaacggcaaacgcgatacgatataacattggacatcacttgtttacaattcaggccgaatgagcacttttaaacccttaaaaatacttgcttcgcgccgtcaggtgctgaaagccgggctggctgcgatgacgctgagcggcgtcgcctcacaggtcagcgcaaaagaacagccactgaaaacgtcaaatggacatagcaaacccgccgccaaaaaggccgggggtcgccggattgtaatgttagatccgggccacggcggcatcgataccggcgctatcggccataacggctcgaaagagaagcatgtggtgttggcgatcgctaagaacgtgcgcagcattttgcgcagcaacggcatcgacgcccgcctgacccgcaccggcgatacctttatcccgctgtacgaccgcgtggagatcgcccatcagcacggcgccgatctgtttatgtcaatccacgccgatggttttaccaacccgagcgccgccggcgcctcggtgttcgccctgtcaaaccgcggcgccagtagcgccatggcgaaatacctctccgatcgcgaaaaccgcgccgatgaggtcgccggtaagaaagcgacggataaagaccatctgctgcagcaggtactgttcgatctggtgcagaccgacaccatcaaaaacagcctgacgctgggctcgcatatcctgaaaaagatcaagccggtacataagctgcacagccgcaataccgagcaggcggcgttcgtggtgctgaagtcaccatccataccgtccgtgctggtggaaacctcgtttatcaccaacccgaacgaggagaaactgctcggcaccaccgccttccggcagaaaatcgccaccgcgattgccaacggcattatcagctatttccactggttcgataaccagaaagcccattcgaagagacgttaatgaaacccgatgccgcgcaggtaaaaacttttctgctccagctccaggacaacctcagtcagcagctgagcgccgtggatggcgcgccgtttattgaagatgcctggcagcgggaaggcggtggcggcggacgcagccgggtgctgcgcgaaggccgggtgttcgagcaggcgggggtcaacttttcccacgtccatggcgacgccatgcctgcctccgccaccgcgcaccgcccggagctggccggacgcagttttgaagccatgggcgtctcgctggtggttcatccgctgaacccctacgtgcccaccagccatgccaacgtgcggttctttattgccgaaaagcctggcgccgacccggtgtggtggttcggcggcggctttgatttaaccccttactacggctttgaagaggatgccgtccactggcatcgtaccgcccgcgatctgtgtctgccgttcggcgaggaagtctatccgcgctataaaaaatggtgcgatgattacttctatctcaagcaccgccaggagcagcgcggcatcggcggcctgttctttgacgacctgaacaccccggattttgaccactgcttcgcctttatgcaggcggtcgggaacggctatgctgacgcctatttacctatcgtcgaacgccggaaagccacgccgtacggcgaacgcgagcgccactttcaactctaccgtcgcggccgctatgtcgagttcaatctggtctgggaccgcggcaccctgttcggcctgcagaccggcgggcgtacggagtcgattctgatgtcgatgccgccgctggtgcgctgggaatatgattatcagcccgagcccggcagccccgaggcggcgctgagcgagtttattcaggtgcgcgactggctgtaacggccggatggcggctggccacccggtagcggagtctcttccctcacacccactggcgcaggcgatggtgcagcgtcatcgacggtttctcagcaaacagctgctgatagtcggtggcgaactgccccaaatgccagaatccccactgcatggccgcctccttgaccgtctcgcgctctgaccaggggcttatcagctcccgacgcacggcgttcaggcggatccgtttgagccaggcgttaggaccaatccccagtatcgcatggaaggcgttttgcaaggtgcgacggctgacgtacagctgctggcacagatcgagaacggttaacggctccgcgctgttttccagcacatattcgcgcgcctgcgccagcaggcggcggtagctctggtggctgacgctctctgcacttaccatcggctgcgcttcttccagcatcgtgcccatcgccagcaacagattatcccgcaggactttacgcacggccggctgatgaagggtatccggatgctcgctaaaggtggccagcgcctgctggacaaacccccacagcgcggccttatgcggctcgcggaccgccagcgctgactggttgcgtagcatatgtagcacccgttccgggtggtgcaggaaactggcgtgacgcgcaatcacctcctgcgaaatcactaccccgagaatggtgtaatcatccggcgtgctgagctcgaactccgtaccgccgggacgggtggcgatttctgcccggcccagacactgcgagccgataaacccctgttctccccgggtcgccggaatgccaaaccagaaggagttcggccagaccaggcaggactggcgcagcgccagcccggtatattcgcggaagacctggatctcatcgagcaggatttcggtaaactcgccgcgaaactgccccggatgcagctgatcgtagatctgttgccaggcggtaatggtcagggcgtgctcatacacatcggttgtgtgtcgttgatgaatattgtcaatttcaacctgaggcgtcagcctgatgtcttccggcaacgcctcgcaacagagatggtgcaaatttgcagaacgacgctttttcataatcgttaaagccgggggcaagccgctcccggcacctccgacaggttatggatttttgagacgatagcggctactgcgttttcgtagcgaccctgcggaaaagagctgctccagcgcctggcgggccttatccagcggccaggcaaaatgcgcggcgacctcgccggccgtcatgccttgacgaactgaagccagcagcgtcagtaaggcttccgatgaagccgggtcagcaggcggcatggtcgctggcggcggtggctgaaaaccgccgatcagccgctgggtatcctcttccgggcggccaatttcccgacggctgatcacgcagccggtccgccgggcagcggcggccccggcatccagcgcggcgcggcaggccgccaggtcgccctccaccaccagcgttaacctgcccgggtcgagcacttcatgactgagcaggcgcacattggccgccttaagcatggcatccgcagcgtctacagccgcgaccatgccctccacttcgagcaatcccagcgcattgatcatcgctccctccattacgcacgctgtacaggatgacgggcaatatcgagaacggcatcggtaaaggcattgcaggcggctttacaggcggcctggcttcccgtcaaaaaggcggccgaatagttggtttccgatggcggcgggacgtaggtcaccagctgaacgtcggccgacttcatcgccgcatcgataccaaacgtcgcctccagcggcggcgccaccagataagcgatcggatcgcccaacgcgatgccagcggccgatgaaagataagagccggtacgcgacaccacgtgcgccagaaaggcggtatcttgcgcgtcgttagcccactggaatgccgccccaccttcaatatgcgccatcatggcatccagcccggcgcgaacttccgccgggttcgggccgccaagcatgatcagtacttcgccggcggtaggcgacggaccatgggccgcaccggcgtagagggagcggccatagaccacctccaccatcgcctgctttgtcgcttcgtcggcggcaatatacgtcacatcgtcagaatctgccgtgatgagtccgaggctacgtatatgcgacggtaatttaagctcgcgcgcgaaaccgtcattcaccgaggcaatcacgcgcatcgcggtgaccgagggtcgaatcaaatctaatgctggcatgatgcctccttaacggctcatgttgatgccggaggctttctgctccagcatgcgtttggctaaatccacgatcaccgcggcggcttctaccggcggggtgccgccctggtggatattggagatacaggttcggtcggcctcgacggtggtcgccacccgcggggagtacaccgcgtagcaggagaggctctccgactggccgagccccgggcgctcgccaaccagcaggatcaccaccttcgcgccgaggatctcgccgatctgatcttcaatcttgacgcggccatagcgcacgaagaacggcgtcccgaccttcagacccgcctgtttcaggccggcaagcagcggcggcaggatctcttcgtagttggcggtgatggcatccgtcgacaggccatcggagaccaccacctgcacatccggatccatcacgcactgcgccttcagcgcatcaatcgcttccggactgaggcgacggcccatatccggacgcgtgaggtagaggttcttatcgctaatctcggaacgcacttccagcagcccctgcgctttcacccacgcttccggcacctctttgagcaccgtgtctttcgagcgcgagtgatcggccaggaagcgcagcagcgcctgagtgcgcggacgcgggccggcgcggccggtgcaaacgcgcgccgcggtactgcgttttagttcggtcagtacttcggcgcggtgcggatgttgtaccccaatccaggctttcgcttccgctgagcccaggtccagcgcgcagctttccaccaccgcttcgctggcgcaggcgacatggcaggccggcgtcgacgctgcgggggcctgcggctgcgactgtggttgtcccattgacgccattacgctgcgtacaatgtcttcaatctgtttttgatccatgatgtgtcatccccgcgtcatcagaagaacagtgacggatcgcccgcccgtttggtcaggcgaccatttgccataatgcccatcgtttccagccagcgttcaaactccggcgacggccgcaggcccagcagctggcgcacggtcgcggtatcgtggaaggcggtggtctggtagttgagcatgatgtcgtcgccgagcggcatgcccatgatgtagttgcagcctgcggtcgccagcaggatcatcaggttttcgttgaggttctggtcggcatcggcatggttggtatagcagcagtcgcagcccattgagatgccgctcagcttgcccataaagtggtcttccagtccggcgcgaatgatttgccggtcgttatagaggtactccggcccgataaagcccaccacggtgttgacgaggaacggatcgtagtgccgcgccaggccatagttacgcgcttccatggtcacctggtcggcgccgaagttagcgccagcggaaagcgccgagccctgcccggtttcaaagtaaagacagttctccccggcgatgcggttaaactccgcccccaccgcccgcgcttcatcgagcatcgccagctcgacgccgaactctttaagccctttttcactgccgcagatgctctggaagataagcccccccggcgcgccgcggcggatggcttcaatctgggtggtgacgtgcgccagcacgcagccctgggtcgggatgttaaacttgtcgatcaccccgtacaccgtatccagcacccggctcaggttctccacgtcgtcagtgaccgggttgacgccaatcaccgcgtcgcccgcgccgaaggagagcccttcatagatttgtgcggcaatactctgcacgtcgtcgcgggtatcgttcggctgcaggcggcagctaaaggtccccggcagaccgatggtggtattggcttttttgatcaccggcatttttttaccgccgtagatcagatcggcgttggagcagatcttggccaccgcagccaccacctcggaggtcagccctttgcggacaaaggcgatatcgtcgctgatgacctcgtcgttgagcacgtattcccgcaggtcgctgatggtccagtgtttaatccgctgataggcggtttcgttcacgtcatcctggatcaggcgcgtaacgcagtcctcctcatacgggatcaccgggttattacggatatcggccaccgtcatatcggagagcacctgcttggcggccacgcgctgctgcgaactctccgccgctacccccgccagcacatcccccgaacgcagttcgttggctttcgccagcacctcttttacatccttaaactgataaacattgccgaacaatgtggtctttagtttcataagtcgttccctcaggaaggaaatgcgagtgatttcaccgtcaccggcacaaccgatccgccaaaaagaggcgtaccaatgtcgatatagtctcccgcccggatgctcacctcatcgatgaccgccagcggaaggtgtggaagctgtggccgcagcagcatgcccagcgctttgccaaaatcctgctcggccaccagcagcagcggacggggattgggaaagcgggcgacaaacgccagcagggcgtcaattacggtcagtaaggtggcgtagcgcaccggaagtgaagcgggaagcgccagcacgtaagcgtccgcctcgggagccagatcgagctgcgtcagcgcctggagccaggcgttcggcagatcggcggcatcctgcgggatagccaccggcaaattgcgcagcggcaatggaaccccctccagccagatggtgctcccggacagggacagcgtatgcgccccggcgccaatcaccgtggcgcgcacggtttgcgtcggaaactgcacgttcatctcacgcaggcgcggatgctcatgcagggccgtggccagcagcggcccgatatcggaaaaacagaaaggatcggcgggctgatggcggtagcactcccccactccgccggaaagggtaatcacctccggctgaatacccgcaggcagtacttcggtttgcatcagcccctgcgccagcggtgagagggtgccctcgatcacctcgacgatcagcgccgccatccggcgcgccacctgcgccagctgcccggcggtcagcgccagggcgttagtgccggcgccaaacagcgcatcgacaatccgctgccccggcgggtgcgcgtggaccacgcgcccctgagcgtcggtttccagcaggcggccgccgacgttgaggcaggcggtggcgctgacgtttccggcgtcaaacagggcatagttcgaggtaccgccgccaatatcgatattgagcacccggcacatccgctgccgggacagggtctgcgccccggcgccgtgtccggcaatgaccgactccagatgcggcccggcgctggcgacgacaaaatcgcccagcgactgcgagagcgccatcaccgccgggcgggcattgcgggttttcgcgctttcgccggtgatgatgatcgccccggaatccaccgcttgtggagcgatccctgcggcccggtactgagccagaatcagcgcctcaagctcggcctctttcagttctccctgcttatcaaccggcgtaaagaagaccgggctttgccagctaatgtcgcgtttgatgaattcataacgcggcacctgggaaaccgccgcgcggttcaccagctcgaggcgcgagaagatcacctgcgtggtggtggtgccgatatcaataccgacgctcaacagctggcgcgtgttcacgagtgcgcctccgcttcgttgttggcaggcgccggtacgttttcatcttttggcaccagcagcatcgccacgccaatcgcggtaacgccgccgaccagcttgccgacaatcatcggaaagatcatggcgttcatgttggccgccgcaaaaccgagatggtcgccgagggcgaacgccgctgacaccgagaaggcgcagttgatcacttttccgcgggtatccatctgcttcatcatgccgaacatcggaatattgttcgccagggtagcgaccatgccgccggcagccatattgttgatttttagcagattaccaacgcgcatcagcggcttttcaaaccagcgggtcagcaggagcaccatcggataagcgccgagcagcacgcaggagatagagccaatgacttcgatggcgcgcatcacttcgccgggctggtcgccaggcgccataaagatcggatcgagcccggggatcagctcccagccgagcaggaacttgatcaccgccgccgccaggccgatggtgatcagcgccacgaggaatttggcgaagatctggaagccgttgatcattttttccggaataaacttcagccccagcgccaccagcacggcgacgatgatcaccgggatcatattcatcaggatcagcgcgaaggtaaactctaccggctggccgttgatctccaccccggaatacatcgccaccagaccgccggcgatacagccgatgggaatggtgacaatgcccgccagcacgccgagcgccagccagcggcgatcggttggttcgataatgccgagcgccaccggaatggagaacacaatggtcggccccatcatagagccgaggatcaggcctgagtacatccaggccgccacgtcgccgcccgcgagttctttagcgaggaagaaaccgcccatgtcgcacgccagcagcgtgccggcgaacatcgacgggttggcgccgagcatctcatacagcggaataatcaccggaccaagcagatgagccagcactggcgccagggcggtcatcccgaccatcgccaggcccagcgcgcccatcgccataaacccttcttcaaactgaccgccggatccctcaatgcttttccccagtttgccgagaaagcgcgccgagccgccgaactgcgacaggatcctgtccacggcggcaatcagcataaagaacatcatgatgtacatgatgatttcgttaattcccatagcccttactccctgtcatttatgatttgtagatactgtgaataccgggacattagccgcactcaggcgactttcccgggccgcggcgtgaacgccttacccgggctacggcatagcagacggctgtgatcctgtagcccggctaagcgcagcacgagccgggaaagccacagccacacgcctccgggaaaatcggcatttatcgcgccgccgcgtacagctcgataatctgctcccggctggcggtgcgtggattggtgcgcaaacagatgtcctcctgcgccgcttgcgcccaggcggcgtagtgcgcggacgtcgcgccagcctccgtcagccgcatcgtcagaccgacctcggcgatcagctcgcgcacggcggcgatagcctcgcggtcatcggttttcttgccggttaacgcccggccgatctggctgaagcgcgcccggcgcaccatgcggttaaactccatcaccgttggcagcagcatggcgttggccagaccgtgcggaatatgcagcgccgcccccggctgatgcgccatggcatggcatagccccagcccggcgctggaaaacgccatccccgccatgcaggaagccagcagcatgttctcccgcgccgccagatcctgaccgcagcccaccgctttcggcagcgcctcgccgatcatggctatcgcccccatcgccagactgtcggtaaacggcgtggcgtggcgggcgctgtaggcctcgacggcgtgggtcagcgcatcaatcccggtcattgccgtgatatgcggcgggacgccttcggtcagcgcggcgtcgaggatcgccacatccggcatcagcgaggcatgcgccagcacctgtttgcgtccactcaccgcatcgataatcaccgtcacattggtggtttcagacccggtgccagcggtggtcggcaccgcgatcagcggcagacgtgggcgcaactcgctgtgctccgtcatctcccccagcgtctgctcaggattggcgaccagcagcgccaccgccttcgccgcatccagtaccgatccaccaccaaaggccaccacgccgtcgcagcgcgcgtcccgcagctgggcgacggcggcgcagacatcggtgacgcagggttcgccggcgggacagggccagagagtcatagcaatccctttcatcgccaggctacgctccagcccggcggtcattcccgcctgatggagaaaactgtcaaccatgacaaacagatgcctaaggccccgggactgcgcttgcggaccgcaggccgccagcgcgccgacgccgtgcagcgtcaccggcggaacgttgaagcttttcatttgctgaagattcagcgtatcaaaggcatggaacagcgccgtctgcagttcagcttgcatacatcccctccgctttttccctcccgctgttggcgattgccagcggggtcataaacaggctgtgctgcggcaaatgcaccggtaatgccgggaagcgctgacgaaacagctcatgcacacccggctgcatacaggcgccgcctgccagccacaaatcgacaatcccttgtccggcaatatgtcgggcgacaatttcggccatcttctcgtacaccggcttaaccaccggccagatctccccggcgtggctgcgcttgtactgctccgcctcctcaagcccgatgctgcgattcccggccagagtcagggagatatggtggccgccggtggcttcatccgccgaatacgtcaccctgccctgtttaacgatggcgatcccggtggtgccgccgccgatatccaccaccccggcgttatcgagctgcagcagatcggccaccgcggtaggctcatccagcacatgactgatctccagcccggcggactccaggacattgatcgaaatgcgcggatcggtgccgggcggaaacgaggtcgccgcatgggtgaagcggcagcccagctcctgctcgagagtcgcaagatgtcggcgcacgagggtgacggcgccaaagaaatcccagacgatgccgtcgcgcaccacgtcggcccagtcaaggcataccgcaaccggctggccgtcacggtcaaccaccatcgacaccacgtcgcaggtgcccaaatcgatgcccagccacagcggcgactcgctggcggcgggcgcctggttacacagggcagcggctttttgtagtctcggcgaaagccagcgttgttcgtcgtgcgccatgttcatcccttatacgattcgaaacgcatccaccagcacgcagcggcgcagacgaacgaaggtccgcgcgctggtcaccccttccccggttggggtggtgatggtcatggtggtccagccctcgccgcccagcccaagcccggcgatgcacggtccatttttgacgaagatgctggtgtcgatggcattcgccatctggttcatgttgtcgatgttgcgcgagtgcatcgccgcggtgtggtggcagccgccttccagttgcaccgccagggcgatggcctcttcaacgttcgccacccgcaccaccggcagcaccggcatcatcagttcagtaacagcaaacggatggctggcgggcgtttccacaaacagcaggcgggtttgcgccggcacctgcagaccaatcgccgcggcgattttgcccgcgtcgcgaccgacccagtcgcggctgaccgtgcctttgccgcgctcgtcaatatttttcagcagcagcggctggagctgttcggcctgcgccgccgtgagtttcaccgcctgctggccttccatcaggcgcatcagttcgtcggcaacgctatcgaccacgatcagcaccttctcgtcggcgcagataatgttgttatcaaaagaggcgcctttgacgatcgcctgcgcggcgcgcggtagatcggcagtctcatccaccaccaccggcgggttgccagccccggcggcgatcaggcgtttgttggtatgtttgcgcgccgcctcgaccaccgcttcgccgccggtcaccaccagcaggccgatgccagggtacttaaacagccgctgggcggtgtcgatatccgggttcgccacggtcaccagcaggttggccgggccgccggcggccactaccgcctggttaagcagggtaattgccctttgcgagacctttttcgccgccggatggggggcgaagaccacgctgttgccggcggctatcaggctaatggcgttgttgatcaccgtcgccgccggattggtggacggcgtcaccgaggccaccacgccccagggcgcattttcaatcagcgtcaggccgttatcgccggtgagcacctgcggagtcagacactccacgcccggcgtgccgcgcgcctgcgccacgtttttggcaaacttatcttcaacgcgtcccatgccggtctccgtcaccgcaagctccgccagttcacgggcatacttttcacccgcctcacgaatggcctgaatcacctgctgacgcatcgccacccgctttaatccctgctgggccaccgttgccgccgcgacagcgtcatccagtgaggcaaaaacgcccatatcatgaacggtgccggcaggctggctgctgtctttcattttcagcagtaccgctttcactacctgttcaatgtcctgttgattcatgatttttcaccctacttatggaagagcacctgaccatcggccgcagcctcatccacgataccaatcacgcacagatcgaccggagaggcgccgtgtgcgtgcgcctgtcgcgccgagctgccgctgaccagcagtacccactctccgcatcccgcgccgatgctgtcgatggcgaccgcacattgcccgtcgggctcgccgcgggcattgagcatctccaccatcagcagtttgtcgtgggccagaccttcatggcgtacggtgcagaccacatatccggttaccacagccagcttcatgtccgtctccgcgtgtgatgtgcaggccggaaaagcgcaacgccatccggcattcatgccttttcatggccggatagcgacgcgctggcgtcttatccggccagaattttccggcaccccctcccccgttagatgttgctgtcgcccttgaagctaatcgggaagacctcttccagatcgccatgcgggcgcgggatgacatgtacagagaccagctcaccgatacgctgagccgccgccgccccggcatccgtcgcggctttgcacgccgcgacatcgccgcgcaccatggcggtcaccaggcccccgccgatctgtttcactcccaccagcttgacgcgggccgctttgaccatggcgtcggaggcctcaatcagtgcaaccaggccccgggtttcaatcattcctaatgcttccattgtgttttcctctcataaggggtcctgaaggggaccattcattcaaccagcgtggacgagtcggggatccggcttgcgtccgtctggcgcggtaccgacgccaccagcgccagttcgataatttcctctacgctacagcctcgcgagaggtcgtgaagcggggcggccaggccctggatcagcggcccgatggcgcgatatccgcccagccgctgggcgattttgtagccgatgttgcccgcctccagcgacgggaagaccagcacattggcccggccctgcagcgggctgccgggcgctttgtgcgcagcgacgtccggtacaaaggcggcgtcaaactgcagctcgccatcgaccatcagctgcggcgcccgctgacgcacgatctccgtggcctgctggacgttagccacacagggatgccgggcgctgccgtatgtcgagaaggacagcattgccacccgcggcgcttcgccagcgatcgcttgccaggtctcggcgctggcaatcgcgatatccgccagctgcgccgcggtcggctgcggcaccacgctgcagtcggcaaaccccagcggctgtccggcatactgcggcagcatcagaaacagcgaagagagcgttttacatcccggctgcaggccgataaggcgcagaccagcgcgcagcacgctggcggttgacgagagatttccggcgatacacacctcggcctgcccggcgctgaccatcgccgcggcgaacatcagcgggtcggccagcttgtcgaccgcgtcagcgggcgctttatcgccggcgcgcgcctgccaggcggcggcaaacgcctcgcgcatcgccaggttgctgtgcggatcgatgacctgcaccccggtcagcggcagacgttcgccaagggcgaactgccgcagcgcgaaggggctggcgacgaggatcggatgcgccaggccctgctgctgcagataatgcgccgccttcaacacgcggacgtccagcgcatccgggaacaccaccctggcgggggcacgcagcgccagtttgcgacactggtcaatgatcatcttcacctcccagctgctgcagttggctgagcgccggcggcgcgtccgtcacgcccaggatcatcatcacgtagaccgcgctggaaaggcggttgagcgcttgcataatatcggcgcgctggaccgcaaattgcggcgtaataaacacctgcgccgcggtcacctccgcctcgcgcactttgccgcgcagcaaattaagcagcgcgacatcgcgcccatggcgggcctccggcaccaggtgatcgtgacccaggtaacgcagcggctgatgggacagacgatgcagctgcgcctcgctgaatccggctatcgactgcgccgccagcggttcctccagcgcatcggcgcgcatgatgttgcccagccgcgaacggatgtccgtcagccacggctgccagggctccgccagttcaatttgcagccacaccgtcagggcgatggtgctgtccagcaccgcgcggaaggccagccgcggatcgtttttcgccaccagggtatcggccgtcagatgagttaaggtgtccggctttttgcccaccggctgctgacaaagctcgcagcaggcctggggcggatggtcgctgctggtcaggacatgcaccggctgtggcgtctgttcgtcatcctcgacaaacaggcgcccctggcggtcgagaaatttgacccgcagatgccgactttccagcagttccctcgccgagggcgtcaggcgggcatcggcaggaagatggatttcaccgccttcgctgagcgtatgattcgctctgagccacgcttcggtaatgaaatcgttcatagcgattgccagtttgccggccaggcgacgtacaggaagcgcaccgtcgacggggtaccgaattcgatgctggagcctttcgggatgaacatgacgtcccccgctttggcgaccagcgtttccccctgatggcgcacatgcagctcgccctccagcaccatatcgatttcgtcgtagttcagcgtccacgggaagaaggcgttctcccactgcataaatccggccgccatgctgctgccatcctggtcagtcaccaggtccgttaagccgacgcagtgcggctgggcgccgtcgaagcggccaaacttcacgctgctgccgtcgatcactttgatgccgcctttgccggtcactgcctcaaatcccggctgcatcgcctcctgctccagggactgcttctccttcatcaccttttccatcagctgcgccaccaggctttcggtaaactggccttccggcagctgcgccaggatggtttcccggatccgctggctttccgttttgtcgctgtccgccgctgtcgccgccggcgcggcgccatcgtcttcggtgatagtgaatcccagcagctcggcgacttcgcgcgcttccggggtgataatgctggcgcgcagaactactgacatcgcctgttcgccgcgcgcgtgggcggcacgaatatcgttagcggtaatgagtttcttcacctggcccttcctccttttggctgagctcactcaagtaattttccagcggcgcgacgctttgcggatcgcaaccgttgagggcgaaaaccggcgcctgaaaccccatcccgtccagcagctgccgcaccgcggcgacgttggcatccggcagatccgttttgctgatcgccacgataaggtgctttcggctgccaatatccagcaacccgggtggcaggcgactttcggtatcattggccgcatggacataaatcagggtgtccacatcctgcaaggtggtaattaaggcgtgataccagcgcggatggctgaaatattccccgggtgtatcgatgtcgccacgatcgttaaattccagcgcctgcgtttttctggcgagggaataattcccctgcagggcattaaataacgtggtttttcctgcaccgacggcgccgacaatcgcaatacgcttcatggtcgctctcaattaacttttcgttaattcgcacaaggtataatttaataagcggcctaatccgccgatggtctgcagaagcgcctcctccaccgcgccgaccgagccgtagatcaccagcgcgccgctaaaccggtcgagaaaaccgatgtgcacgtcggcggccttcatcgccagatcgccggcgatcatcgctgtttctcccggcgtcagcgtcataatgccgatcgcgccggattcgggtacgccgatctttttcgccagctccgctcccgggtgggcaatcagatgcgccagcgtgacctgtttgcctggtacgaattcctgaataatgcgttctttatccatgactgattgccccctgaaatctgtcctcatggtgacgacatttcagcgcggcaaataacaaatttcggcaagtggggttaaaaggtgaagtggatcactcaggagagaaaataatattgcggtggaattaaaaaggcaggctcagcgttttttactcaccggcctgcctgatattgcgcgcggaaacggatccgcgcgttaacgggggaaatagaaaattacagcggttcggtttgcgcttcaacaaccgccagcgccaccatattaacgatccgacgtacggaggcgatcggcgtcaggatatgcaccggcttcgccacccccatcagcaccggcccgacggtcaccccttccgaactggagacgcgcagcaggttatagctgatccgggcggcttccatattcggcatcaccagaatattggccgcccccttcagcgggctgtccggcatgcgatcgttgcggatgctttccaccagcgcggcgtcgccatgcatttcgccatcgatcatcagctccggggcgcgggccttcaccagctccagggttttacgcattttgctggctgacggacagtcggcagagccaaagttggagtgcgacagcaacgccacgcgcggttcaataccaaagcgtcgcacgctttccgccgccatcagggtgatctccgccagctcttccggcgacggatcgtgattgacataggtatcggcgataaaggtgttgccgctcggcagcagcagcgcattcatcgccccggcggtgctgacgccgtcgcgatagccaaacagcggctgcaccacgcggtagtgatcgtggtactcgccaatagtcccgcagatcatcgcatccgcttcaccgcgatgcaccatgatggcgccaatcaccgtggtgttgctaatcaccgcccgctgcgcctgctcctgggtaatgccgcggcgcttcatcagctggtagtactcgctccagtactctttaaaccgcgggtcggattcattattgacgatctcaaagtcaacgccggccttgatctgcaggcccagcttctggatgcgcatttcaatcacgctcgggcgccccaccagaatcggtttggccagtcccagagacaccagctcctgggtggcgtgcagcacccgagtctcctccccttccgccagcaccacgcgcttcggctctttgcgcgcctgagagaagataggcttcataaacaggttggttttatagacgaactcgctcagcttctcgatataggcgtcaaaatcggcgatcgggcgcgtcgccacaccggaatccatcgccgccttcgccaccgcgggggcgattttgacgatcagccgcgggtcgaatggtttcggaatgatgtagtccggaccaaagcttaaatcctgatcgccgtaggcggaggccaccacttcgctctgctcggcatgggccagctcggcaatcgcatgcaccgccgccagcttcatctcttcgttgatcgccgtcgcgccgacgtccagcgcgccgcggaagatgaacgggaagcaaagtacgttgttgacctggttagggtagtcggagcggccggtacagatgatggcgtcatcgcggacctgcttcgccagcggcggcagaatttccggctccgggttggccagggcgaggatcagcggcgcccgcgccatcttcttcaccatctcctgagtcagcactttcgggccagagcagccgaggaaaatgtcggcgccgtcgatcacgtcatcgagggtgcgtttgccatcgtcttccaccgcataggcggctttggtttccgccatgttcggctcacggtctttatagataacgcctttcgaatcgcagaccacgatgttgtgcttttgcatccccagcgccaccagcagattcatacaggcgatcgccgccgcgcccgcgccggagaccaccatccgcacgtcggacagattcttctcgacgacgcgcagaccgttgaggatcgccgcggtgctgatgatcgccgtgccgtgctgatcgtcatggaagaccgggatattcatccgctcgcgcagctgctgctcgatgtagaaacactccggcgctttaatatcttccaggttgataccgccgaaggttggttcgagggcggcgacgacgttaatgaatttgtccggatccagctcatcgacttcgatatcaaacacatcgataccggcaaatttcttaaacaggacgcctttgccctccattaccggcttaccggccagcgcgccgatgttgccgagccccagcaccgcggtgccgttggagacgaccgccaccaggttgccacgggcagtgtatttgtaggcggccagcggatctttttcgatttccaggcagggggctgcgacgcccggcgagtaggccagcgccagatcgcgctgggtggcgagaggtttggtcggcgagacctggatttttccgggaaccggaaattcgtggaagtcgagggcgctctgttttaactgctcatccattttctattcctttctttcacgtatcgttcgtaggggaaaagcgtgatgaccatcctgtcgttcacctttcagtggcagacagtatccctcctggcggggcgataaactttgaacaccgccaaactctggccatcgttatgattttgttgttatcaatttatagcggttatgttacccggattcgccgccaataatagccctgtctgctatgctttttggttatgtacctcatcaatgtttataccgtataccggcaagcactcatgtaacaccttgttccaggaggacttatccatgaatcagttagacagcatcaagcagttcaccacggtggtcgccgacagcggagacatcgaatccatccgccactaccatccggaagacgccaccaccaacccctctctgctgctgaaggccgccggcctggcgtcctatagcggcctcatcgacgacgctatcgcctgggccaaaaaacagggtggcggccgcgaagcgcaggtggctcacgcctgcgataagctggcggtcaattttggcgcggagatcctcaaaagcattcccgggcgggtctccaccgaggtggacgcccggctctccttcaaccgcgagaaaagtatcgagaaggctcgccacctggtggcgctgtatcaggagatgggcattgataaatcgcggatcctgatcaagctggcatccacctgggaggggatccgcgccgcggaggtgcttgagaaagaggggatccactgcaacctgacgctgctgttttccttcgcccaggcccgggcctgcgccgaggccggggtttatctcatctccccgttcgttgggcgtatttatgactggtatcaggcgcgcaaaccgctggagccttacgtggtggaggaagatccgggggtgaaatcggtgcgcaatatctatgactatttcaaacagcataaatacaacaccatcgtgatgggcgccagcttccgccgcaccgagcagatcctggcgctggtcggttgcgaccggttgaccatcgccccgcctttattaaaagagctgcaggccagcgataccccggtggtgcgcaaactgatccctgccagccagatcctgccgcgtccggtgccgctcagtgaagcggagttccgctgggaacataatcaggatccgatggcggtcgaaaagctagcggaggggatccgcctgttcgccgtcgatcagcgcaaactggaagatctgcttgccgccaaactgtcactttagtctcacggagaaaaatatgtcccgaagagagcttgccaacgccatccgcgccctgagtatggacgccgtgcagaaagccaactccggccatcccggtgcgccgatggggatggctgatattgccgaagtgctgtggaacgattttctcaagcacaatccgcagaaccctgactgggtggaccgcgaccgctttatcttgtccaacggccacgcgtcgatgctgctctacagtctgctgcacctgaccggctacgatctgccgctgtcagaactcaagcagttccgtcagctgcactctaaaacgcccggccacccggagcatggctatacccctggggtggaaaccaccaccggcccgctgggccaggggctggcgaacgccgttgggatggccatcgccgaacggacgctggcggcgcagtttaatcgccccggccatgagatcattgaccatcacacctgggtgttcatgggcgatggctgtttgatggaggggatctcccatgaggcctgttcgctggccggcacgctcggactgggcaagctgatcggtttttacgatcacaacggcatctccatcgacggcaaaaccgaaggctggttttccgatgatacggcggaacgcttccgcgcctatcactggcacgtcataggcgatatcgacggccacgatccgcaggctatcaaacaggcgataacggaagcgcaggcggtgaaagataaaccgtcactgattatctgccggaccatcatcggcttcggttcgcccaacaaagccggctcagaggagtctcacggggcggcgctgggcgaaaaagaggtagcgctggcccgccagcagcttggctggaaatatcctccgttcgagatcccgaaagagatctacgcgggctgggatgcgcgtccgcgcggggaaaaagcggagcacgcctggaacgagaaattcaccgcctaccagcagcagttcccggagctggccgctgagctgacccgacgtatgaatggcgccctgccggaagactttgccgcgatcgcccgcgactacgtggcgaaactgcaggccgagccggcgaaaatcgccagccgcaaggcttcgcaaaacgcgctgaacgcctacggcccgcacctcccggaactgctgggcggttctgcggatcttgcgccgagtaacctgaccatctggtctggatcgacatcgattaaagaagatcctgcgggcaattatatccactacggggtgcgcgagtttggcatgaccgcggtggccaacggcattgccctgcacgggggctttattccttatacctcgaccttcctgatgtttgtggagtacgcccgcaacgccgcgcgcatggcggccctgatgaaggcccggcagatcatggtctatacccatgactcgatcggtcttggggaagacgggccgacgcaccaggcggtggaacagctggccagtctgcggctgacgcccaacttcagcacctggcgcccctgcgaccaggtggagaccgccgtcgcctggcaggcggctatcgcgcgacagggcgggccgacggcgctgatcctgtcgcgacaaaacctggcgcagatgccgcgtaccccggaacaggtgcaggatatcgcccggggtggctacgtgcttaaggatgccggcggaaaacccgacctgatcctcatcgccaccggctcggaagtggagatcaccgtcctggccgcggaaaaactgttggccaaaggggtaaatgtgcgggtcgtctcgctcccttccactgatgtgtttgacgcccaggatgaggcctggcgcgaatcggtgctgccgtcggacgtcagcgcccgggtggcggtcgaagccgggatagcggactactggtataaatatgtcggcttaaaaggcaagatcgtcggcatgaccggctatggcgaatccgccccggcagagcagttgttcccgttctttggctttacggtcgaccatatcgtcgccaccgccgaacaggtgcttaacgggtgatccacagcgtgggccaggcatctggcccctgccagttgtcgcacgtcggctgctgcgcgtagcgggagaggctgaaccgctggccgtcaaaacgccagcgggtttggatcccgcaatcgccggccccgcggcctttatccagggtcaccagctcatggcggcggtcatcatagctggcgttgatcagctcaatctcacgcggcgcctcgcccggcggctggaatggcaacgttagccgcacctgacgggcgacataggggcgctggcgggagaccagccaggccagccagacggtgttgtaggcgccggattcgcagctggtcatcagcagcactttgtcatccgtcagcgcagtaacgcgaatttcacggcggaagggatcgagggagcagtggctgttggtcatccgctcattaccgtagtccatcagatcgttgagctcctcacgccccagcggcgactgcgccgtttccgcgctcgccaccgcgcgcagcgccggcgccggcggtacgctgagcggcggctcttcccctttgccgacccaggccgtttcgctacctacccgcttttgccgatcgtcgataaaaaacagagccgctttcaacccctgcagggagatggtctgcaggccattggccagcgagagcgctttaccctcctgaacctgctggagaaacgcatcgatcgtcacgctgtcggcggttttaatgagcttatcttcaatgtgccagcgcttgtcggtcaggggcagcggtttaccatccagcagcaggcgcggcgctatcggcgcgagcgtcgccactggattgccggtgccgcccagctcgatacgcagactggcgtcagtgactgccccagcgctgcggctgagggtcatcaccaggccatgatgcagccccacgttacgggtgacgcagaaattttggttgttacaggtgaccagccagtcgttgaagcgctgctgcgtcggtgccgaccatgcctgcgagcaaggcagcaccgccagaaaaaggaaaaagatgacgcgaaaaagcatgaaccgcccgaccccagataaacccgaccacggcgcctatcctggacaacggcagcgggttactcaatcggatttgtcagagttccccgacatcaggccggaggtttgcagatattgcagcagaatgaccgccttaccgtcgcggatctccccgtcagcgaccatctgcagcgcctggctaaaaggcagctccagcacctcgatggcttcatcatccaccccgccgccgctggtggttcgctgcgcgtcgctgtactcggcgataaagaaatgcactacctcggtgacgccccctggcgacataaacagctcaaacagctttctcacctcgcccacttcgtagccggtctcttccaccgcctctttacgaatgcaggcttccggctcgtcgttgtccagcagcccggcgcaggtttcaatcagcatgccgtcatgattgccattgacccaggtggcgacacggaactgacgcaccaggaccaccgtctgcttatggcggttatacagcagcacggtggcgccattgccgcgatcgtagacctcgcgcttgtggcgcacgacgctgccgtccgcccgcgtcagctcataggtcatgttgcgtagtacgaaccagttctcagagaggattttatctttaatgacgtgaatattgagtgacataccgaccccacagcgtaaaaggacgccctcatactacgctgcggagccgggtttgtcgtcagtgaagcggcgtcgttttccgcgccagatagtccaggatcccctgcgccgcgtgacggccttccgccatcgccgtcactacaaggtctgcgccgcgcacggcatcgccgccggcaaagatcttctcctgactggtctgataacggtaacggctctccactccggctttaatacgcccctggctgtccagcgccacccccgccgcttccagccagggcatgcggtgcgggtggaagccaaaggccatgatcaccgcatctgccggcataacaaactcgctgccggggatcggcgtcggacggcgtcttcccccggcgtccggagcgcccagctcggtgcgcaaaaagcgaaccccgttaacccgcccgttctcgtccagctcaagcgtcaccggttggacgttaaactcaaagagcgccccctcttcgcgggcgtttttgacctcttttttcgagcccggcatgttggcttcatctcgccgataggcgcaggtcacctggcgggcgccgtggcgcagcgcggtgcgcacgcagtccatcgccgtatcgccgccgcccagcaccaccacgttcagcccggcggtgttgacataaggctcttgcgccgatgccgccagccccatcacctgtttggtgttggcgatgaggaacggcagcgcatcgtagaccccgggggcctcttcgttcggcagcccagccttcatggagcgataggttccggcgccgacgaacaccgcgtcatactcggccagcagtgtcgccatggagatatctttccccacctcgcaattgagctcaaagcggatacccatctcgctgaagatcgcccgccgccgggccaatagcgatttatccagcttgaacgccggaatgccgaaggtcagcagaccgccaatctccggatgacggtcgaagaccaccggctggacgccgtggcgcaccagcatatcggcgcaggccagcccggccggcccggcgccgataatcgccacccgcttgccgctcggcttcacctgcgaaaggtccggacgccagccgctggccagcgcctggtcggaaatatagcgctcaatattgccgatggtgactgccccgctttcatcgcgcagggtgcaggcgccttcacacagccggtcctggggacagacgcggccagtgatctccggcaggcagttggtctgatgggaaagcgcgaccgcggcggcgatattccccgctttaaccagctcaatccactgcgggatatggttatgcagcgggcaggtccattcgcaaatactgtgctccccacacgtgagacagcgggcggcctgctgctgcgcctgctgcggggtgaacggctgatagatctcctcaaagtggctcttacgcacctccgccgccagcttatccggctccccgcgcgggggcgtcatcgccatttgcctgaccttcgcgccagcattgggctggctgcagagcggcgtagcgcgctgccacggctgcacctcctggcatgccgagcgcagtcgccgctgcttcgccagggtgatcaacgtctcatcgtcggcgagggtcagcgcctgcgcgggacagttttccacacaggccggccccgcctcgcggccctggcatagatcgcacttgtgcgcgctggctttcaccaggcctgcggcctgcggcgtcaccaccacctgcatcaccccgaacgggcaggccaccatgcaggatttacagccaatgcatttctcctgacggacctgaacgctgtcgccggactgggcgatggcgtcgttgggacaactgcggacgcagggggcgtcctcgcagtggcggcaggtgatggcgttacgctggccctccgctttgatcacggtgatacgtggcaaaaagcgctgcggggtcagcacgtgttgctcctcgttatgcgccatcacgcaggccacttcgcaggcctggcagccgatgcactttcggctatcgctcaaaataaagtggttcatggcttccttttgtcttcttggtgaataacccctcaatgcgcatgcctatttattacccgacaagatgacgccggaacaatgtccaattgcccaggataaactttttctggagagaatccgttttggatcaatttttttgacttaaatgaaatgaggtttcacaccggcaagggataatgcgccggtctgcggtgacgaagcagactcgctacctgctggcaggaaagctcgaggtttctttacgatacggcaaaagcaacatgataaattacactatctccttaatttctccacgattgccggagaggctggcgctaaagtggcacaggctgtgcaataacaagaaaatgtgcatatgaggtttttattctgatggcgaatttctttatcgatcgccccatttttgcatgggtgctggcaatcctgttatgcctgacgggcacccttgccattttgtcgctgccggttgaacagtatcccgacctcgccccgccgaatgtgcggatcaccgccaactatcccggcgcttccgcgcaaaccctggagaataccgtcactcaggttatcgaacagaatatgaccggcctcgataacctgatgtatatgtcctcccagagcagcgccaccggccaggcgacgatcaccctcagctttaccgccggtaccgacccggatgaagccgtgcagcaggttcagaaccagctacagtcggcgatgcgtaagctgccgcaggcggtgcaaaaccaaggggtgacggtacgcaagaccggtgataccaatatcctgacgctcgccttcgtctccactgacggcagtatggataaacaagatatcgccgactacgtcgccagtaacatccaggacccgctcagccgcgtcaacggcgtgggggatatcgacgcctacggttcgcaatactcaatgcgcatctggctcgacccggcgaagctcaacagctaccagatgaccaccaaggatgttaccgacgccatcagttcgcagaacgcccagattgccgttggccagcttggcgggacgccttcggtcgataagcaagcgctgaacgccaccatcaactcgcaatctctgctgcaaaccccggagcagttccgcaatatcactctgcgcgtcaatcaggatggttcagaggtgacgctgggcgatgtcgccaccgtcgaaatgggggcggagaagtacgactatcttagccgctacaaccgccagccggcctcaggcctcgggatcaagctggcttccggcgccaacgaaatggccaccgcggagcgcgtgatcaatcgcctcaatgagctggcgcagtttttcccccacggtctggaatataaggtcgcctacgagaccacctccttcgtgaaggcttccatcaccgacgtggtgaaaaccctgctggaggcgatcctgctggtcttcctcgtgatgtatctgttcctgcagaacttccgcgccaccctgatcccgaccatcgccgtgccggtggtgctgatgggcactttcgcggtgctgtatgcctgtggctacagcatcaacaccctgacgatgttcgcgatggtgttggcgatcggcctgctggtggatgacgccatcgtggtggtggagaacgtcgagcgcatcatgagcgaggagggcctgtcgccacgcgaggcgacccgcaaatcgatgggacaaattcagggcgcgctggtggggatcgcgatggtgctgtcggcggtattcgtgccgatggccttcttcggcggcaccaccggcgccatctatcgccagttctcaatcactatcgtcgcggcgatggtcctctcggtgctggtggccatgatcctcacccctgccctttgcgccacgctgcttaagcctgttaagccaggtgaatcccatgaaagaaaaggcttcttcggctggttcaaccgcaccttcaaccgcagcgccagccgctacgaaaccttcgtcggcaaaatactgcaccgctcgctgcgctggatgctgatctacgtcgtcctgctcggcgggatggtgttcctgtttctgcatttgccgacctcgttcctgccgctggaggatcgcgggatgttcaccacctcggtccagttgccgagcggcagcacccagcagcagacgctgaaggtggtgcagaaggcggaagattacttcctcaataacgagaagcagaacgtcgagtcggtgttcgctaccgttggctccggccccggcggcaatgggcagaacgtggcccgtatgttcgttcgtctcaaagactgggaccagcgcgacccgcaaaccggcacctcctttgccattattgaacgcgccaccaaagcgtttaatcagattaacgaagcgcgggttatcgccagcagcccgccggcgatcagcggcctcggcagttcggcaggcttcgatatggagctggaggatcatgccgggaaggggcacgatgcgctgatggcggcgcgcgatacgctacttgagctggccgggaaaaatccgctgttgacccgcgtccggcataacgggctcgatgacagtccgcagctgcaggtcgatatcgatcagcgtaaagcgcaggcgctgggcgtctccattgacgacatcaacgatacgctgcaaaccgcgtgggggtcgagctacgtcaacgactttatggatcgcggccgggtaaagaaagtctacgtccaggcggcggcgaaataccggatgctgcctgacgatatcaatctttggtacgtgcgcaatagcagcggcacgatggtgccattctcggccttcgccacctcgcgctgggagaccggctcgccgcggctggagcgctacaatggctactcagcggtggagatcgtcggtgaggcggcgccgggtatcagtaccggtaccgcgatggacatgatggagaagctggccgcgcagttacccaccggctttggcctcgaatggaccgccatgtcctaccaggaacgcctctctggcgctcaggcgccggccctgtacgcgatttctctgctggtggtgttcctgtgcctggcggcgctgtacgagagctggtcggtgccgttctcggtgatgctggtggtgccgctgggggtgattggcgccctgctggcgacctggatgcgcgggctggagaatgacgtgtacttccaggtgggtctgttgacggtgatcggcctgtcggcgaaaaacgccattctgatcgtcgagttcgccaatgagctcaacgagaagggccaggatctgctcagcgccacgctgtcggcttgccgtcagcgcctgcgccccatcctgatgacctcgctggcgttcatcttcggcgtgctgccgatggcgaccagcaccggcgccggttccggcagccagcatgcggtcggcaccggagtgatgggcgggatgatctccgccaccgtgctggcgatctttttcgtgccgctgttctttgtgctggtgcgtcgccgttttccgctaaaggagcgtccgcaataaaccgacgagcttcggcggcgaggcgtaataacagaaaaggcgaccacggtggtcgccttctttatgtgttcagaaccctagcgcgcttatttacttcgcgttattcccctgctcacattgcggaaatttatttacgaagcatgccttcaataaagtctttccagttccccaattcatgttcaatcataatagcctctcttattattatggtcgattctatataacttcattaccgatgggaagttgtgctcccctattgctctgattgtcttatggaccgctgacagagataaaacctctggttgtcgctactatgccgcttcgtatgtaaacataatgtgacgtagagcaacctcagacaacatttttgcaataatgttaaagccctcacatcatgcccacaggtggccaacatttaaccacccgatatatcgaatgagatccccggtaaaaagttatatttattcatctgaatcacgtattatttcagtaagacttatatattcggaaatatctgagttaaccgcttaattgaatgtaaaaggtttatctatgctcaccatgtacggaattaaaaactgcgataccattaaaaaagcccgccgctggctggaagcgcatcggattgagtatcgcttccatgattaccgcgccgatggccttgagcgtgcgcaactggatacctttattgccgagctgggctggcaggcgctgctgaacacccgtggcaccacctggcgcaaacttgacgagtcgctgcgcaatagcatcgataatgccgacgccgcagccgcattgatgctggaaatgccggcaattatcaaacgcccattgctctgcgcgcccggtcgtcctatgctgctgggttttagtgaagcaagttatcagcagtttaacgaggtatagtctatgtcttgcccggtcattgagctggctcagcagcttattcgccgcccttcccttagccccgatgatgcgggatgccaggcgttaatgattgaacgcctgcgtgcgatcggctttaccgttgaaccgatggatttcggcgatacgcagaatttctgggcctggcgcggccacggcgagacgctggccttcgccggccacaccgacgtagtcccggcaggcgacgccgaccgctggatcaatcccccgttcgaaccgaccatccgcgacgggatgctgtttggccgcggagcggcggatatgaaaggctcgctggcggcgatggtggttgccgcagagcgttttgtcgcgcagtacccgaaccacaggggccgactggcgtttttgatcacctctgatgaagaggccagcgccaaaaacggcaccgtcaaagtggtggagacgctgatggcgcgtaacgagcgtctggactattgtctggtcggcgaaccttccagtaccgaagtggtcggcgatgtggtgaaaaacggccgccgcggctcgctgacctgcaacctgactattcacggcgtgcaggggcatgtcgcctatccgcaccttgccgataaccctgtccacctcgcggcaccgatgctggcggaactggtcaatatcgagtgggataaaggcaatgagttcttcccgccgaccagcatgcagatcgccaacgtgcagtccggcaccggcagcaataacgtgatccccggcgatatgttcgtccagttcaacttccgcttcagtacggagctgacggacgagatgatcaaatcccgggtgatcgccctgctggaaaaataccagctgcgttacagcgtggagtggtggctctccggccagccgttcctcaccggacggggcaagctggtggatgcggtcgtcaacgcgattgagcactataatgagatcaaaccgcagctgttaaccaacggcggcacctcagacggacggtttatcgcgcgcatgggggcgcaggtggttgagctgggccccgtaaacgcaacgattcacaaaattaatgaatgtgtgaacgccgccgacctgcagctgctggcgcggatgtatcaacgcgtcatggaacagctggtcgcctgacgaattgacgtaaagaggaagcgcgcatggaatggcttattaaacactggtggattctggtgctggtctttttggtgggggtaattatcaacgtgattaaagatctaaatcgcgttgaccacaaaaaattcctcaacaacaaacccgatctgccgccgcaccgtgattttaacgataaatgggacgacgacgacgactggccgaagcacgaccagtcgaaaaaaccgtaagtttgcctttatcgcggtaccgcccgcctgtaaccccgctctccggggttacagcatttcgatgatatcatccccttttggcgtactgccgctcagcgcctcatcaaaatagtgcttcggcacggtataacgcagacgctcgatcgccaactgcatactgcgatcgtcaatggcatgcccgagatcgtcgacaatatctaaggtcacgtcgccgcccgcctgctgtaacgcctcctcggccgacaccgcccacgccaggtcgataacccgatcttcaccaccgtggatcaggtgaatggtagtggccgtcgttgccgtctccggcagcgtcgcatagcggccattaaaggcgatgacccgcgaagccagatccggcgccgctttgatactctccagcgacataatcgccccctgagagaaaccgatcagcgcggtggcaagtggactgacgccgctcttttcctgccagtagcgtacaatttcaataaaggtcggcataatggcgtcgatgcgctgctgacgattctcttccgtcaccccctgcagtgaaaaccactgccgaccgttggggccgcaaggttccaccccgccgatactgacgatcagcgcatcgggaaactgcggcgcgaaccagctgccgatttgccccatggagaccgggttatcccctacgccatgaaacagcagcaacagctgttgcgcaggcgtcgcaggactttgaacaataaaatgatcgtgtttcatggctgtctccttagtgtttgcgggcagtgtacgccgctcgccagatatgaccatgccatttaactgaatgagttagttaaaaaaattgcagatgcgccacctgctgacgcagcgcatcagcgcgcgctgcatcaaggaagcgcaaggcgtcagcggcctcccgacgccatctcgcctgcaaggctttacgccccgtcagctgcagcacggcgcagagtgcggcctcctctttgccctgcagtcgtccccgcagggccggcaacggcatgtcggcctgcatcagtaggcggttgaggcagcccagcgccgcggccagcgggcggtgggcgaaggcaaagctcgccgcttccagccagtcctcatcactaagcatagcgtctgcgacggccggcagcggcgcggattcctctcgccacgggcgaagccagtattcatcgcgctgcagccgctgcgcctcccgctgcgccagctggcgccctgccgcggtcaacggatagagggccatcgccgtatagcagccgctgctggcctcgcgatgggtacccagccgtacgagggtaaacccgcagcgttgccagaagcgccacagctcagcggtatagccgaagctgacggagagatagtcatagccagcggcatcggcggcgatatcggcgatcatcttccgccccaggccttcccgctggcgggtgggatggacagcgatccgactgacccgcagcccgcgcagcgtcgccgccaggggactgccgccgtgcgccgccagcgactgggcgaccagattcccgcgcggccggcgaaaacccgcccataccgcccggctcagttcgcgagaaagtcccccctcggccaccagccacagggcgcccgccaccgcgccgccggtgcgagcgcagcggaaagcctggcccggagcatccatcatgcgccgcagatcgagcggggaagttcggtaatgcgccccggacaatagctggtacatcgcctccggtagcgctggctgcgtttgccagcaggactgattgaccgcctccagggctatctcccccatcggcgcgtcgcgaaatgcctcatcgttaaagataagcaactgactgatggctgactccagcggacagcccgccgcccagcggatcggggcgctcagggtgaaggattgcagatggggcagactggcgcaaaatttcagcaggaacccgcgaccggtgccctcgtacccttgcaccgtcgtggtgagtagcgtgcggggaaaacggctcaccagctgccggagaagcggagccgggatagccgcggcctcatcgactatcagccacgccgccttttctttcgacgccagcagcgcatcgggcgccataaagcgcaacgtctccccggcaaagctggccagcacctcgacagcgctacgcgttggggcggtgacgatggcctcgcccccaagctggcgcaggagcatgcccgccagcgcagacttcccccgtccacgctccgccgtcaccgccgcgataccgggcggcaggcgtatcagttgctcaaggattgccgcctgctcggcctgcgggcggccatcggcgggatgccagtctggacgcggggcggccagcgggaaacgtggccggtccgactgccgccagagcaacacctccggatcggcgataaactgccgacagcagcggtgaacaaagttaggggtaacgatagggtcaggcgtatcgctccagcgcagagagtcctcatccgcccgggtcggccagtcggcgaaggggggcgtcagcagcaccagccagcttcccgcccgcagcgtgccgctcagggccgccatggcggccacatcaaacccgcgccgggcatcgaaaaaggcgtgcatcacttcccgccccagcagcgttttcagcgcgccgggcgccacgcagggcgcagaaaccggctcggggccaacccacaggccatcgccgccgagcctctcccgtagcgcctgcgcctgctgcagcgtccagctctcatcgccgctgagcaccagcaggcgacggatcccctcccgcgccatttgcgcggtgaggttaagcagcgcgtccatcatgggggacgattacagcgcgctgccgaaggtattgcactgcgccggatcgccgctatcgaaaccgcgtttgaaccaggtgtagcgctgtttcgaggtgccgtgggtaaaactgtccggcaccacgcgtccctggctctgctgctgtagacgatcgtcgccgatggcctcggcggcgttcagcgcctcctgcagatcgccagtttccagaatatcctgctgctgcatattatgaccccagacgccggcgaagcagtctgcctgcagctccatcttaaccgacaggcggttggcttcggcctgcgtggcatgctgctgttgctggcggaccttcggctcaatgcccagcagtttttgtacgtgatgacccacttcatgagcaatgacgtacccctgggcaaagttgccgtcggcgcccagtttatttttcatctcatcgtagaatgacaggtcgatatagaccgtactgtcggcaggacaatagaaggggcccatcaccgactgaccggtgccgcagccggtacgggtcgcgccgcggtagagcaccagctttggctgcgggtactggcggcccatcttttcaaagatcggcccccaggtatcttcggtggtagccagaatgacggaagtaaacttcgccgcttcatcgtctttcggactgatggagcgctgcgtggaggtctgctgctgcggcatcggttcgccggtcaacatgccggtcaaatccacgccgtagtagcccgccaccagcacaataatcagcagtacaatgccgcccttcccgctcggcagacggaagccgccgcccccgccgccgccaaacggcgagcctgattgtccacgtcgatcttcaacattgtcgctttcgcgacgcccttgccagcgcataagcacctcattccctgttatgtatcaatagcagagatcgtaggcggttcagcgcaggattaccacaggaaacagcaagagacgccagaagatgaggccatcttctggcggcgggcgggttagtcgagcttaacgcccaggcggtgagccacttcttcgtaggcttcgatcaggccgccaaggctctggcggaagcggtctttgtccattttatcgagggtgtttttatcccacaggcggctgccgtccggcgaaaactcgtcgcccagcaccacttcgcctttgaacagaccaaactccagcttaaagtccaccagaatcagaccggcgtcatcgaacagttttttcagcacgtcgttggctttgtaggtcagctcgcgcatccgcgccagattctctttactcacccagccgaaggtttcgcagtaggagtcgttgaccatcggatcgtgcatagcatcgtttttcaggaacaggtcgaacagcggcggattcagctcgataccttcttcaatgcctaaacgttttaccagcgagcctgccgcacggttacgcaccacgcactctaccggcaccatatccagttttttcaccagacattcggtatcggagagcagcgcttccatctgggtagggatgcccgcttctgccagtttactcataatgaaatggttgaatttgttgttcaccatgcctttacgatcgaactgctcgatgcgcgcgccatcacctgctgacgtatcgttacggaattccagtaccagcaggtccggattatcggtgctgtatactgtcttcgccttaccacgatacaactcagcttgctttttcatctttcactactccagtgatattgagccaaaaaatgacgtgtcggtcttacataacatcctgcaacgggcgttggagcggatgctgtacgcttgcggggcgaactgcagtcaggcgactggagcagccttaacgcggcgatttacaggattatatggccacgcacacgtttgcgtcactatacatgaaaaagggccggattgctccagcccttttgattacttgttaaatgcggcctggaatacggctaccagggcgtcattttgcgactgcgtcagggtgtggcctttcgggtcgataaactgcaggctactgcggttatcgaggtcgccgacctgcagtttgtagtcgccggagaccagctgcgggtcacgtgcgcccagctcctgccagctgctgtcagacagcggcttataggtcagcgccatgctgccctgagagcgcgtgctgtcggtcactttcatccccactttctcgagggcgccaggcagacgctgccacaccaggttaaacggcgcgcgaactacgagcatcggcaggccggtatcgtcggcggcgctctgcacgtcgaaggtggcccccgcgctgcgctgtgcggcgttctgggcgctggtggcattcatgtcaaggccttccgaaatgacgttcagcatagcggtgctgtagcgctgcagagatgccggatcggcaaccggtttacccgcctgctccagattcaccagcttaacgaccaccgcttgctgataaccctgcggtttgacggagatttgataacgaccgcgatactgctgatcttcatcaagacggttccactcaacccagtcggtgttcagcgtctggctcgcatcatcgcgcttggcgataacgtagttcttcgcctgaagaatactggtgacctgtgcccacagcgaaccgctgcggccgttctcgaccatcagcgtcgcggtatcgccgttaaactgggtccgcgcaccgctcaccagcgccagcggctgcgccggcggacgaatgtccagcgctttaccgaccgcgccggtgctgttagccaccggaatattgtaatcacccacctgaatcggcaggatcatccccgccggcgcatgaagttcgctcaacggtgatgcctgtaaataggcctcatcaccgctcacctgacgcttatagcgcgagtcagaactacaggccgcgaggagtagaaccagcgaaacacccgcaaccttcgccaggcgcgacttctgtactgagtaagccatcaaatctccctaaactttacagcaaaccggcatgcttcagcgcggcagtgacggcttcacgaccatgatcggtgataggcgtcatcggcaagcgcagcgtatcggtcgccacaagacccaacgccttgcatccccatttcaccgggataggattgggttcgacaaataattttgtatgcagtggcatcagacgctggttaatcgcacgagcttcggcaaattgacccgccagcgccagacggcacatgtcggccatttcgcgcgccgccacgttggccgtaacagaaatcacgcctacgccgccgagctgcatgaagtccataccggtcgcatcgtcaccgctcagcagaataaagtcgtctgaaaccagctctttgatctggtgaacgcgacttaagttccctgttgcttccttaataccgacaatatttttaatttccgccagacggccaacggtttccggcagcatatcgcaaccggtacgggacggcacattatacagaatttgcggcaggtcagtatgttcggcgatagctttaaagtgctggaacaggccttcctgggtcggacggttataataaggagtgaccgtcaggcagccaacaacaccgctgtcgttaaaacgtttggtcaggctaatcgcctctgcggttgcattggctcccgttccagcgataaccggaatacgcccgtcggccagctccagcgtcatcatcaccacgtcgccatgctcttcatggctcagcgttgcggattcaccggtagtccctaccgaaacgatcgccgaggttccgttggcgacatggtaatcaatcagttttttcaggcttgtccggcagacattaccgttttcatccatcggcgtgacaagcgctacaatacttcccgtgaacatgggccatcctcagagcagaagtgcgacaagattctcaatgttacgtttggagctgtaataaaagcaagagacccgacgccatcagggatgttgtatggcggttttttttatgctttcctaatgttacctcacctttttaaaggaagaacaggtttgacagcctcattacaacactatctggttattaccgccctgggggctgaccgtcccggcatcgtgaatacgatcactcgccacgtcagcagctgcggttgtaatatcgaagacagccggctggccatgctcggtgatgagtttacgtttatcatgctgctttccgggtcgtggaatgcgattaacctgatcgaatcaactctgccgctgaaaggcgcggagctggagctgttgatcgtgatgaaacgcaccactgcgcgcccgccgcaggccatgccaaacaccgtttgggtccaggttgaggtgccggactcaccgcatatcatcgagcgctttactgccctgtgcgatacatggaatatgaatattgcggagctggtgtcccgcacgcagccgggagacggcgattccgcgcagctttttatccagataactgcccacagtcctgcgacgcaaaatgcagcaaatatcgaacaagcgttcaaagccctatgtacagaactgaacgcacaaggcagtattaacatcgttaattattcacagcatgatgaacaggatggagtttaacccatgaccccactgaaagccggtgatatcgcaccgaaatttagcttaccggaccaggacggcgaggaagtaaatttaaccgacttccagggacaacgtgtcctggtttatttttacccgaaagccatgaccccgggctgcaccgtacaggcgtgcggcttgcgcgataatatggacgacctgaaaaaagccggcgttgaagtgctgggcatcagcaccgataaaccggaaaaactctcccgtttcgccgaaaaagagctgctgaactttacgctgctgtctgatgaaaaccatcaggtttgcgagcagtttggcgtctggggcgaaaaatcctttatggggaaaacctacgacgggatccaccggattagtttcctcatcgatgccgatggcaaaatcgaacacgtctttgatgatttcaaaaccagcaatcaccacgacgtggtgctgaactggctgaaagaaaacgcctgatgcaaagcaagacgccgggagaggaagccctcgcccggcgtctttttttattctcattgccttagtcgtcgaccgccaaaccatccggccaggcatgcaccacagctttaatcagcgtggccagcggaatggcgaagaagacgccccagaatccccacagtccgccaaagatcaccaccgacaggataatcaccagcgggtgtaaattgaccgcttccgagaacagcaccggaaccagcaggttaccgtccagcccctgaataatcagatagaccgcaaacaggctccagaactcggtgccagcgccaaactgaaacagcgccacccccaccaccggaatggtcaccacaaacgcgccgatataggggatcagcaccgagaagcccaccagcaccgccagcagcaacgagtagttgaggccaaagagaataaagcctatccaggtggcgacgctgacgacaatcatctccagcaccttgccgcgaatgtagttggtgatctgctggttcatctctttccacacctgcccggcaagcccgcgattgcgcggcagaacgcggcgcaccgcgttgagcatctgctctttatccttcagcaggaagaagaccatcagcggcaccagcaccagatagaccgccagggtgagtagccccaccagcgaggccagagagtacttaaccaccgagtcgcccaccgtcagcatccgggtgcgcatattttccgccatcgcatcgataatgccggcatccattaacgccggatagcgccgcggcagcgtggcggcgaaatcagagagcttatttagcatgcccggcatatcgcggatgaggtagatcccctgctgccaggctaccggcagcaccacaaaggccagcaacagcaggatgcccacaaagaggatcagcaccagcgaggtggcccaggtgcgcgacagaccgatgcgctccagacgaacggtcggccactccagcagataggccagcacgatagccaccagcaacggggccagcaggccgctgaaaaagaacataatgccgaaaccggcaagcaaaataaccagcagcgctatcgcctcagggtcgctgaatcgacggcggtaccactgcattaacatctcaagcataaaaccttccctgaagggccaagcggcgacaatccagggaattgtatcgaaatgtcacaaaaaagacttcgctttttgatgcgccgcagtcaaaccgttctccgccatgaagaacatattttcaaggcggccaacgccagctaaactcgctgggatgcggccagggaacattacgccgcacaatcggtcaaactggcacacccacattacaggacagaggttatgttcaggcagttgaagaaaacgctggtggcgaccgcgatcgcgtcgctgacgctgggttcgataggtcctgcttttgctgactccgcagataccctgccggacatgggaacctccgcaggaagcactctgtcaatcggtcaggaaatgcagatgggggattactacgtccgccaactgcgcggtagcgcgccgctgatcaacgaccctctgctggtgcaatatatcaacgggctgggtatgcgtctggtggctcacgccaactcggtgcgtaccccgttccacttctatttgattaataacgaccagatcaacgccttcgccttcttcggcggcaatgtggtcctccactccgccctgttccgctactctgataacgagagcgaactggcctctgtcatggcgcacgaaatctcccacgtgacgcagcggcatctcgcccgcgcgatggaagatcagaagcgcaatgcgccgctgacctgggtcggtgccctgggttcgattctgctggcgatggccagcccgcaggccggaatggcggccctgaccgggacgctggccggcacccagcagggtatgatcagcttcacccgccagaacgaagaagaggccgaccggattggcattcaggttctgcagcgctcgggtttcgacccacaggccatgccgatgtttatgggtaaactgcttgacgagtcgcgctactcgacgcgaccgccggaaatgttgctcacccaccccctgccggaaagccgactggccgatgcccgtaaccgcgccaaccagatgcgcccggtggtggtacagtcctcggcggacttctatctggcgaaggcgcgtaccctcgggatgtacaccaacggcgacaacaagctgggcaccgatctgctgaacgcctgggataaaggcaatatccgccaacagcatgccgcccagtatggtcgcgctctgctggcgatggaaagcaataactttgaccaggcacgcaaaacgctgcagccgctgctcaacgccgacccgcaaaatgcctggtatctcgatctggccaccgatatcgacctcggacagaagaaaaccagcgacgccatcaatcgccttaaaaacgcccgcgagctacgtactaatccggtgctgcagttgaacctggccaacgccctgctgcagggcgggcagcccggggaagcggcgaccattctgaaccggtatacctttacctataaagaggatggcaacggctgggacctgctggcccaggcggaaggcgcgctgggcaatcgcgatcaggagctggcggcgcgggctgaaagcatggcgctggtcggccagctggagcaggcgatttccctgctcagcagcgccagctcgcaggtgaaactcggtagcctgcagcaggcacgttacgatgcccgtatcgatcagctacgcgatctgcaggctcgcttccgtccctatcaaaaaatgtaaggagaccccatgaccgacgcggtaaaaatttaccataacccacgctgctccaagagccgcgaaacgctgagcctgctgcagagccgcggcatcgatcctgaggtggtgctttatcttgagacgccaccggatgccgggacgctgcgccagctgctgcagctgctgggtatggagagcccccgcgagctcatgcgccagaaagaggatctgtataaatcgctcaatctggccgacccggctctcagcaacgcggcgctgatacaggcgatggtcgacaatccgaaactcatcgagcgccctatcgtcgtcagccgcggccaggcgcgtattggccgcccgccggaacaggttcttgagatcgtaagctaactcacccgcgccgcgcttgcgcggcgcttttttttacgtgggcgattccagatctttcacgccaatatctcccgcccgccggacggtgctactgttcatccatcgctcaatccactggacggatgaacatgaaaaagccgacctccacgccccatgacgccgtgtttaagacctacctctcccatcccgataccgcccgtgatttcctgcagctgtatctgcccgagacgctgcttaaagtgtgcgatctgcgtacgctgcatctcgagtccgggcattttgtcgaagacgatctgcgtcccttttacgccgacattttgtattccctgaaaaccacggcgggcgacggttatatttatgcgcttatcgaacaccagagcacgcccgaccggcatatggcctttcgtctgatgcgctacgccatcgccgccatgcagcgccatctcgatgccggccacgatcgcctgccgctggtgatccctgttctcttctaccacggtctggtgagcccctatccgttctctctgcgctggctcgatgaattcgtcgctccggagctggccggccacctttatcacggggcgtttccgctggcggacataaccgtcattccggatgacgagattgccacccaccagcgcatggcaacgctggagttactgcaaaaacatattcgacaacgcgatctggcgcagctcctcgacaagctgagcgaattattattgactggactggcgacggaatcgcaggtacaagccctgatgcactatctggtacagtcaggcaacacgcgcgagccgattaaattcattcgcgagctggcgttacgtacgccgcagcataaggagacgttgatgacgattgcggaatatctggaacaacaggggctggagcggggcctggcgcaaggccgtcaggaaggacggaaagaagaggcgcagcgcatcgctgtcgctatgctgcacagcggccttccgcgcgacctggtcgcccggttgaccgggctgacggagcaggagctgactcccctggcggactaaagcttaaggatctctttcacgaaggggatcgtcagtttgcgctgagcggtaatcgaggcatgatccagctgatcgagggtcataaacagcgaacgcatctcgcgatccagccgcttcagcaggaagcggcacacatcttccggcatctcgaagccgcgcagtctggcgcgcagctgcagcgcctgcagtttgtcttcatccgacagcggctgcagcttatagatctgcccccagtccagccgtgaggccagatccggcaggccaagattcagctgccgcggcggccgatcgccggtgatcagcagccgggttttgcctgattccaggatccggttatagagattaaagatggccatctcccagggctcatcgccggcgacgcactcgatgttatcgatgcacaccagcgccagctgttccatcccctccagcacctcgggcacaaaccacgtccgtttatccagcggcacgtagcctaccgcatccccgcgctgggaaagctccgcgcaggcggcgtgtaacaggtggctacgacctgccccttcacgtgaccagatataaatgtacccgctgtgttcctggcgcagtacgttctggagggcggcaagtagggaaggattatcacccggccagaaactcgcgaaggtttcgtcgtcaggaagatacagtggcaaagagagctgtgccggtgcgttcagatggacctcaacataggcttacagaaaaacgcgaagagtttaccacagatttaggtcaggagagaaccgggcgggatcgccgcccggtcaggcgatcgttatttaaactcttcgctatccgccgcgtcgaggaccacctcttccggacgcaggacgctgataagcttgaaaatcaggctgagggcgatgcccacgatagtcgccagcgccatccctttcagctcggcggcgccaatgtgcactttagcgccgctaacgccgatgatcaggatcacggaggtgaggatcagattctgcgctttactgtaatccaccttcgattcaatcagtacgcggatccccgaggcgccgatcaccccgtacagcagcagggaaacgccgcccatcaccggcaccgggatgatctggatagccgccgccagtttgccgacgcaggagagcagaatcgcaatgatcgccgcgccgccgattacccaggtgctgtagacccgggtaatcgccatcacgccgatattttcaccgtaggtagtgttgggcgtcgaaccgaagaagccggaaacgatcgtcgacaggccgttggcaaacatcgaacgatgcaggcccgggtcgcggatcagatcgcgcttaacgatattggcggtcaccaccagatgccccacgtgctcggcaatcaccaccagcgcggcgggcagtatggtgaagatagcaaaccactcaaagcgcggagtgtagaaagtcggcagcgcgaaccagtgcgcctcggcgatcggggtggtatcgaccacgcccatcacaaacgacagcgcatagcccaccagcacgccgatcaggatcgggataatcgccaggaagccgcggaacagcacggatccgaacaccgtcaccgccagggtcaccatcgagataataatggttttactgtccggtgactggccgtcggccggcagcagcccggccatattagccgccacgcccgccagttcgaggccgataaccgccacgatggcgcccatcgccgccggcgggaacatcacatccagccagccggtaccggcttttttgacaataaaggagacgaggcagaacagcacgccgcacataataaagccgcccagcgccacttcgtagcccagcggcaacagcagcagcaccggggagataaaagcgaagcttgatcccagataagcgggaattttgcctttacagataaagaggtacaacagcgtaccgatgccgttgaacagcaggacggtggccgggttaatgtggaacagaataggcaccagtaccgttgcgccaaacatggcgaacagatgttgcaaactaagcgggattgtctgtaaaagcggcggtctttcactcaccccgatggcacggcgcgtcatagtgtattcctctgagagtcgtctgttatttgctgtggattacttttattcaaaaaaaagccgactctcaaagtcggcttttttcgcggtatattttatttcgttccaaaaatcttgtcgccggcatcgccgagaccgggaatgatatacccgtgctcgttcagtcccttatcgacagaggcggtgtacagctcaacgtccgggtgggctttctccagcgcggcaatcccttccggcgccgccaccagcaccagcaccttgatgctggtgcagccggcgtttttcagcagatcgatagtggcgatcatcgacccaccggtggccagcatcgggtcaacgaccagcgccatacgttcatcgatgttagacaccagtttctggaagtaaggcaccggctcgagggtttcttcattgcgatagataccgaccacgctgatacgcgcgcttggcacgtgctccagcaccccttccatcatgccgaggccagcgcgcaggataggcacaacggtaattttcttgcccttgatctgctcgacttccaccggaccgttccagccttcaatagtgactttctcagtctccagatcggcggtggcttcataagtcagtaagctgcccacttctgaggcgagttcacggaagcgtttggtgctgatgtcgtgctcgcgcatcaggcccagcttgtgtttgacgagtgggtgtttgacttccacaatcttcattctctttctcctctgaggggcagccacaaaaaaaatcgcgggattataccgctttttgcggattgtgccatacccatcttgcttgacgtatatcaagcaaagtgatttagagacaaaaaaaccggaggcgaggctccggcttgggtgcggggtgcagtccatacgcttacgcgggcctacgtgtattgtaggtcggttaagcgttagcgccacccgactacgacaggttctccccgttgctggcaattacctgctgataccaggcaaaggactttttccggctgcgtgccaacgtgccattgccttcattatctttatcgacataaataaagccgtagcgttttttcatttcccccgtgccggcggaaaccagatcgatacagccccagggggtgtagcccatcagatcgacgccatcctcgaccaccgcctttttcatctccgcgatatgggcggagagataatcgatacgatactggtcattgacgctgccgtccgcttcgcggacatcaatcgcgccaaagccgttttcgacaataaacagcggcagctggtagtgatcccagaaccagttcagcgaatagcgcaggccgaccgggtcaatctgccagccccagtccgactttttgacgtacgggttggagaccaggctggtggtttcatcataatcaagcaaggggttgtcttcggtggctttggtagcgaacgacatatagtagctaaagccaatgtagtcgacacagccctcggttaacgcctgacgatcggcttcggtgatatccagagtaaagccgcggcgggcaaaatagttgagcagatgctgcggatagcgaccgcgcacgtggacgtcggtaaaccagtaacggcggtgcatggcgttcatcgccatcatcatatcgtccggggcgcaggtcagcggatagatggggcacatagcgatcatgcagccaatctgcagcgccgggttgatctcgcgcgccgctttcaccgccagggcgctggccaccagctcatagtgcgcggcctggtacatcaccggttcccggtcttcatccggcaaatatttcaaaccggagttggtgaagggggcaaagtcctcatggaagttggcctggttgttgatctcgttaaaggtcatccagtacttcactttatgttgatagcgggtgaagacgaccctggcaaagcgcacgaaaaagtcgattagcttgcggttgcgccagccgccgtactcggtgaccaggtgataaggcatttcaaaatgcgacagcgtaatgactggctcaatgccgtgtttcaggcattcgtcgaacagatcatcataaaactgcaggccagcctcgttgggctccagctcatcgccctgcgggaaaatacgcgtccaagcaatcgaggtgcgaaaacatttgaagcccatctcggcaaacagcgccaggtcctgtggataacgatgataaaaatcgatcgcctcatggttcgggtagtttttcccggccaccacgccgtcggtaatttcccgcggcacgccgtgggcgccggcggtcatcacatccgccacgctgatccccttgccgccctcctgccagccgccctctaactgatgcgctgcgaccgcgccgccccacagaaaacctgctttaaatccggacatagtctctccctaatgtcgatcgtcgtctggcgaacgatacagctgattaaaatggtaaaccgcgccaatcaggccggcatcgttaccgtgactgacggtatcgagatagtcggcaatgccgaaccaggccagatgctggcgcagtagcgtcagaaatcctgggcgttccacaacgccgccaccgataaaaatggtctgcggatcgaagatatggacgaggttataaaggccatggcccaggccattgaagaactcggcgaccagacgctgacaaaccgggtcgccggcgtcatagcggtcgaaaatcagttcgcctgtcacgctatccagcggcgcgccaatatgttgcgcatagcgatggcgcagcacccgcagagtgcagttctcattcattgaatagcgacgaggatcgcgtccgccgggacggtcggtaagcatgtagccgaattcgccggcacgaaaacgcgccccgttgatcagctggtgttggcagaaaatcgccccaccgatgccagtaccgatagtgagcaccagaaaattggccatctccgccgctttgccctgccagcgctcggccagcagcacacagttggcgtcgttttccaccgagaccggcagcccggttcgcgtctcgagccacgatttcatggcgaagttatcaaatcgacggatagcgccgcccatggtgataaaaccgctgtgcggatcgatatagcccggcgcgctgatggctattccttcacacgacggatgggccgccagccacgacagcattgcctgtaagatccgatcgccatcgctgtcattgattgactgcctggcggtttccagcagcctgccgtcgcgggccatcacgcccatctttaacgcggtgccaccgatatcaaatgccgcaatcttcattcatccctctcctgacccgcgtcaatcaccgacaaaatgcgtggcaaaccaacacggaaaccggtttcagtcgtataatgaggattcctttacgtagaggcaagcaccagactgtacccggtttcattttcgtgagcagtatcaaatttaaccattcatcagcggttttacgccaactgtaaagcaggctcgcaaacgtttgctttccctgttagaattgcgccgatttttcttgcttaccgcaaacgcgtggagacttcgcagtgaccgataaaacctctctcagctataaagatgccggcgtggatattgatgcaggcaacgctctcgtcgaccgtattaagggcgtggtgaagaaaacccgtcgcccggaagtgatggggggactgggcggattcggcgcgctgtgcgcactgccgcagaaataccgcgagccggtactggtctccggcaccgacggcgtcggtaccaagctgcgtctggcaatggatctgaagcgtcacgacaccatcggtatcgacctggtcgccatgtgcgtgaacgacctggtggttcagggcgctgagccgctgtttttcctggattattacgccaccggtaaactggacgtcgataccgcagccagcgtcatcaacggcatcgccgaaggctgcctgcagtccggttgcgcgctggtcggtggtgaaaccgcagagatgcccgggatgtaccacggcgaagattacgacgtggcgggtttctgcgtcggggtagtggaaaaatcagaaatcatcgacggcagcaaagtgaccgatggcgacgtgctggtggcgctggcgtccagcggcccgcactctaacggctattcgctggtgcgtaagatcattgaggttagcggcgttgacccacaaactaccgaccttgacggtaaaccgctggccgaccatctgctggcgccaacccgcatctatgtgaaatcggtgcttgatctgatcgccagcgttgacgtccacgctattgctcacctgaccggcggcggcttctgggaaaacattccgcgcgtgctgccggataacacccaggcgatcatcgatgagtcctcctggcagtggccatccgtcttcaactggctgcaaaccgccggtaacgtcagccagcatgaaatgtaccgtacctttaactgcggcgtagggatgattatcgccctgccggcagcggaagcggacaaagcgattgccctgctgaatgacaaaggtgaaaacgcgtggaaaatcgggtatatcaaagcctccgattccgaacagcgtgtggtcattgcatgaaaaacatcgtggtgctgatttccggtagcggcagcaatttgcaggcgatcatcgacgcctgcggccggaaacagataaacggcaccctgcgtgcggtattcagtaacaaggctgatgcgttcggccttgagcgcgcgcgcctggccggcatcccggcccatgcgctggcgcaaagtcagtttgccgaccgggaagcgttcgatcgtcagctgatgcatgaaatcgacgcctacgccccggatctggtggtgctggcaggctatatgcgtatccttagcccggcgttcgtcagccactatcagggacgtctgctgaacatccatccctcgctactgccgaagtatcctggcctgcatactcatcgtcaggtgctggagaacggtgacgaggagcacggtacctcggtgcacttcgtcaccgatgagctggacggtgggccggttatcctgcaggccaaggtgccggtcttcactggcgacagcgaggaggaaatcacggcgcgggttcaggcccaggaacatgccatttatccgctggtcatcagctggttcgtcgatggacgtctgcgcatggcaggcaaccacgcctggctggatgagcgacagcttcccccgcagggctatgccgccgacgaatgaacaaccagccccgcatgagcacatcgcggggcttttttttaattaaaagtgtttactaatcaaacatctcacagaaataattcttcttactgtcatattgttgtgacacagtaaatcgctacgcagaaaaattcgtcataatagtctacgtcctgtgagtaaaacggagtgtgagcggtaatgggccaggaaaagctatacatcgaaaaagaactcagctggttgtcttttaacgaacgcgtgctgcaggaagcggcggacaagagtaacccgctgattgagcgcatgcgcttcttagggatttactccaacaacctggatgagttttacaaagtgcgcttcgctgagctgaagcgccggattattatcagtgaagaacaaggcagtaccgcccattctcgccacctgttaggcaaaattcaggcccgcgttctgaaggccgatcaggaattcgatagtctgtataatgaactgttgctggagatggcgcgtaaccagatcttcctgatcaacgagcgccagctgtccgtcaatcagcaggcctggctgcgcaactacttcaagcagtatttacgccagcatatctcgccgatcctgatcaaccgcgaaacggacctcgtgcagttcctgaaagatgattacacctatctggcggtggagattatccgcggggaaaacatcaactatgctctgctggaaataccgtcggataaagtgccgcgcttcgtgaacctgccgccggaagcgccgcgtcgccgcaagccaatgatcctcctggataacatcctgcgctattgcctggacgatatttttaaaggcttctttgattacgatgcgctgaacgcctactcgatgaagatgacccgtgacgccgagtacgatctggtgcatgagatggagtcgagcctgatggagctgatgtcctccagcctcaagcagcgcctgaccgccgagccggttcgcttcgtctaccagcgcgatatgccggatgcgatggtcgaaatgctgcgcgataagctctccatttccaactatgactcaatgctgccgggcggccgctatcacaactttaaagactttatcggcttcccgaacgtcggtaaggccaatctggtcaataaacccatgccgcgcctgcgtcatctgtggtttgataaattccgcaacggcttcgacgccattcgcgaacgcgacgtgctgctctactatccctatcacacctttgagcacgtgctggagctgctgcgtcaggcctccttcgaccccagcgtattggcgatcaaaatcaacatttaccgcgtggccaaggattcgcgcattattgacgcgatgatccacgccgcccacaacggtaagaaagtcaccgtagtggtggagctgcaggcgcgcttcgatgaagaggctaacattcactgggcgaaacgcctgacggaagcgggagtccacgttatcttctctgcgccaggtctgaagatccacgccaagctgttccttatctcgcgtaaagaaggcgatgaggtggtgcgctacgcccacatcggcaccggtaactttaacgagaagacggcgcggatctacaccgactattcgctgttaaccgccgatgcgcgcattaccaatgaagtccgccgggtgtttaactttatcgagaacccctatcgtccggttagcttcgactacctgttggtgtcgccgcagaactcgcgtcgtctgctgtatgagatgatcgatcgcgagatcgccaatgcgcaaaacgggcaaccgtccgggattacgctgaagctgaacaatctggtggataaaggtctggtggaccgactgtatgccgcctccagctccggcgtgccggttaatctgctgatccgcggcatgtgctcgctgatcccgggtctggaaggtatcagcgaaaatatccgcgtcatcagtattgtggaccgtttcctcgagcacgaccgggtctactgttttgaaaacggtggcgataaacaggtctggctctcctctgccgactggatgacgcgtaacatcgattatcgcatcgaagttgccgctccgctgctcgatccgcgtctgaagcagcgggtgctggatatttttgatatcctgttcaacgatacggtaaaagcgcgctatcttgataaagaactgagtaaccgctatgtgccgcgcggcaatcgccgtaaagtgcgcgcgcaaatggcgatttacgattatctcaaatcactcgaacaacccgactaacctatgccaataaacgataacacccctcggccgcaggagttcgctgcggttgaccttggttcgaacagttttcatatggtgatcgcccgtgtcgtcgacggcgccatgcagatcatcggacgcctgaaacagcgcgtacatctggccgatggcctcgatgaaaactcggtgttgagcgaagaagccatgacccgtgggctgaactgcctgtcgctgtttgccgaacgcctgcaggggttctccccctccagcgtctgtatcgtcgggacgcatacgctgcgtcaggcgaccaacgcggcggagtttcttaaacgcgcggaaaaagtgatcccctacccaatcgagatcatctccggtaatgaagaagcacgcctgatttttatgggcgttgagcacacgcagccggagcgcggccgcaagctggtgattgatatcggcggcggctcaaccgagctggtcattggcgaagattttgagccccgcctggtggaaagccgccgcatgggctgcgtgagcttctcgcaggcctatttccctggcggcgttatcaataaagaaaacttccagcgcgcgcgcctggcggcggtgcagaagctggagacgctggcctggcagttccgtattcagggatggaccgtggcgctgggcgcctccggcaccattaaagccgcccaggaagtgctggtggcgatgggcgagaaggacggatttattacgccggagcgcctcgagatgctggtaaatgagctgttgaagcataaaaacttcgacgcgctcagtctgcccggtctctcagaagaccgtaaagcggtctttgcgcctgggctggcgatcctctgcggtgtgtttgacgcgctggccatcaaagaacttcgtctgtccgatggcgcgctgcgcgaaggtgtcctgtacgagatggaaggccgcttccgccaccaggatattcgtagccgcacggcacagagtctggcaaatcagtacaacatcgatcgcgaacaggcgcgccgggtactggaaactaccacccagatgctggagcagtggcaggagcagaatcccaagctggccaatccgcacctcgcggcgctgttgaaatgggcggtgatgctccatgaggtagggctgaatatcaaccacagcggcatgcatcgtcactcggcctacattctccaaaatagcgacctgccgggcttcaatcaggagcagcagatgctgatggccaccctcgtacgctatcatcgcaaagcgatcaagctcgacgatctgccgcgctttacgctattcaggaaaaagcagtttctgccgctaattcagctactgcgcctgggcgtactgctgaataaccagcgtcaggctaccactacgccgccgacgctgcgcctgcagacggaagctcaccactggacgctgacgtttccgcacaactggtttagccagaatgcgctggtgctgctggatctggaaaaagagcaacagtactgggaaggcgtgccggagtggatgctgaagattgctgaagaagagccagacgcctgatcgtatctctggctatcaaccgagccgggcgcttacgcccggctttttgctgctcagccggtcatctcctccgccaactgcgtcagaggtaccggtaccccgatatcatagccctgcatataatcgatccccagcgtgatgaccgcctgacgtatttccggcgactccacatattcggccaccacctgcatgttcttcatacgtgccagacgacaaatagagtccacgacctggtaatcaagactgctggcaagcagattgcgaataaaactgccgtcgattttaagaatgtcgacgttcattgtttttaaccgggcgtagctggcgtagccggtaccaaaatcatcgatcgccacccggcagcccagcgcccgcagatgttctaaagtctggcagaccagctcgggattgctgagcgcgtagttctcggtcagctcgaaaataatctgccatggctcaatgttgtaggcctgcagcagcgcttcgacctcctgaggaaactggctgcggctcagcgacaccggagaaagattgatcgccagccgcagaccgggcagcgcccgccggttggcgtccataaaggccagcgtatgctcaataacccactggtccacccgcgtggacagcccaaactcgtgcgccaccggcaagaactcgtttggccccgttagctcacccgactccccttccatcctcaccagcacttcatgatagcgatcgccgcgaatgccctggataggctgcgccatcaggacaaaatggtcatgttccagcgctttgagaatgcggttcatcatcacgactttatctttcagatcctgctgaacatggcccgcgccgcggcgctgtaaattttccggatggccgctggctaacgacatgtcggcaatggtgttcaactcgccaagcagtaaatacagatgcttgaccggcgagcgaacgctgcaatagctcatgccgatccgcggctgcagggggaccccgtcccagtggaaacggaactgtcgcagggagcggtcaattaagtgaatgcgcgcctggtgcccttcgctattgagacggaacactaaatcgtgaccggcaagatgatataccgcttcgttgggctgcagcagcgttctcaggtggttcgccagcatttgcttatactggattcgcaaaagtaccccatagtggcgccccagcagttcaagctcaggaatgcgcagaaaacagagcgtcgaccagctcgtgccgttgagcgcccggctcagcgcccgcaagttcggcatatgaaccaccgggtcgaggaaggccatctgccggacgcgagcgtagatcagccgctgctgtgtcgccagcatcgccgtataggcgacaataaacgagaataccagatagcttgatgacgtgatcgccaactgggtgttatagcttgggtaaattggtaagtaacggtaatgaaaatggatcacggcaatcagcaccggcgtccagatcagtgagataaagcgatagccaaaacgcatggcaccccagagcatcaccggcatcagcaatgacaacgtataattcgtactaaatatggtgctgctatcattaagcggcatcaataatagccacagtagcagaattaataccgtcgcccagcaaataatttcaattttttttatttttggatcaatttgtaagcgaacctgagaaataaagccgcgtaaatgaaaaggattacgaatgacccgtaacacaaaataacacagcggcatgccggtcaggcaccctaccattagcgcctgaaaggtgattaatgaacgtaaactaaatggcgtaacgccggtcatttccgttgtgcgcggatggagtccaagatattcggcaatctgtgacaaaatcagaaaaatgaccgaggggagcagcatttgccagaacagacgatgcggcatcagtcggacgttgccgtgtgagacctgctgacgctgggggacaaaaatgcggtagccgccccagcagagcacgcaggggataaggaaatggaacagtacaccgatggattgctcaagcatcatgccgtgggccagagttaacagcaggccaataataatgccagggatcgccgcccaaccaaaaaacatcatcaggctgagcaccagcgccaggggaagataatacaaaaataccatatgaccattgagcatggtgtaggtattcgcccatctggcgaccggtaataacagcgcaggcagaacgagcggtaaagcccaccacttgtcgcgatattgttgatagtattttaataaattcataggtgctctacagagtgcctctgctcccgcgaggcatattcaggcaggcatccaaccacccatgctgaccgcgtaaataataacgacacggtaacgtccgctgattttagtggccaagagaaggagactattgatataaatcaacaaatgctgacaccaacattaataaatcttatttttcccgacatttcacggctaataaagtgagcatgtaaatacgacgattatcttatataacattaattaatgttttcactgccgcacttttacatctgcatcaattgaccccatctcgttcctgtgccttaataccccatcgcccatcttcgggtatacttcaaggatccttttgtgagtcaggcacccagtatgcgtaaacgacatcgatttaaccgtcgcatgacccgtatcgtactgcttatcagctttctcttcttctttggacgctttgtctactcctccatcggcgcctggtaccatcatcaggataaaaaagcgtcgcaggagtcatcgctcaccgtcgaaccctcccccgcgagtaatcttttgattctaatactgcaagcgccacactccgcaggcagagccgctcgctgctgaagtactgtctttgatgcggtaattttgccgtcggcgatttataagcgcacggtatgcagcaggcgcagcatttcagcgataccttttgtcacaattttgtcctgacgcatgactaccgccagctgtcggtatagccgcggcgccagcgagtgtacgcgtaatccgtcgcgatcctccacccgctccaccgccatgcggggcacgatgctgtagcccagccctgcccgcaccatgcgcttaatcgcctcgatgctccccaactgcattaccggcgtcaccgccagtcccgccgagcggaaccagcggtcaatcagatcccgcgtgccgctacccgcctcgaaggcaatgagcggctgcgcctgcagctcggcgggagtataaaccgccggcatctccgtctcgcggctggcatagatggtcacgaactcctcatctaacatcgcagtcaccgccagactgcgcccctgcacgggcagcgtgaccagcccgagatcgagccggttttcttccaccgcgcggacgatatccagcgtgttgccggtggtcacccccaccgtcagcagcgggtgctgctgacgaagatgctgcagcagcggtggaagaagatgaatgcaggccgtcgcgccagtccccagcgtcaacgatccattaacctcctgactgaatgcgctgaccgactgcaccgcgctattcaccgcccgatcgatctgctcgctgtgggccagcaatgccattcccgccgccgtcgccttgatcccacgtccggttcgctccagcagcctggtctgtaaaaactgctccagctgacgtacctgcaggctgacggcaggttgggagatccccagcgcgtcggcggcggcagaaaagctgccgcgctgtacgaccagccggaaggtcgccagatttcccaggttcagtgttgtcataaaagtttctcttataccgcgcataaggtagccgctctgccagaacaatagcctgccgggtaggctcaggacaactgtcttaacggaatgaaaaaccatggaaataaacgctattccccgacgccttgccttcaccgcgggcggtcagcaactcatcaactgggggatctctttttatatgcccggcacctttgccggggctatcgccgccgacaaaggatggtccttgccgcagatctatctcggcctgacgcttgcgatgctgatgatggccgctgtctccccgttcgttgccaggttgctggctcgctttggcggaaggctggtggtcaccagcggtaccttactgatagccgccagctgcgccatgatggcctggcgcccttcgctggccggctggtacggcgcctggctgctgaccggcatcggcatgcggctctcactgtatgatgcgctgttcgccgcagtggtgaatctgtacggtcagcaggcgcggaaaactatctctcatatcactctcgctggcggtctggcctctgccctcttctggccgctgggcgaggcgttattaaccatcatgccctggcagaatgctctgcggatctatgcgctgtttggcctgctgagcgcatggctgagttatcaactgcctcgccagcggctcagttcagcggcgaaatcaccagcctcgccagcgacagcagagggcgaccggcgtaacggggcgcgttacgcgatctttattgcgctgatcaccttcatctctaacggtacctctacccatctgccggagtttatcagccactttggtctgccggttgccgtcggtatgctgtggggattcggccagaccggcgcccggctgggggaagtgctggccggtccccgggtcacctcactcacgctaacgcgttttactgcgctcgtcatgccgctctgttttctccttggattgagcagcacgacctatgccggatgcgcagccgggtttgtgctgggctatggcgcgattaacgggctggtgacgattgtcaaagcgacgctgccgctggcgctgtttagcgcagaaagctacgccagccgcacgggtctcctgctgatccccgggcaactgatggcagctgtttcaccctttgcctacgcatggctgaaccaccggctgggcattatcggcggaatgtgggtgtccaccgggttaacgttgatcgttgccggactggcgctggcgatggtgcgcgaggcgggtaaggcgcaggatgaacgtaatgtagaatacccggcagcggccgttgaccaaccgatagccaaaaacaaccttgctgaagagtaaacgtggatcactacgcccttgataatttacgcctgcgcttatagccatatggcaggcattattcatactataaatttttaatgaaaatacattcaccaaatcaatgatgaaatttttaagagaatagcagggcatgctgtcacctgcgaaaaataacgataccgcctgtatttttcgcttgcataatgatccaaaaaataaagccagtcgccatcggtaacattagccacacctccggtaacacaattagctttactctcttcctcatcgaaaacgttcgagcatagcaaagaatgagcgctaattttaataccgtagcaaaacccggcggcaatcgatgcaatctggcctgtcggtattgtttttatctggaaaacgaggttccgcgtccagggtatgccaccatggacgacctcacgctggaagcgtacattcacaacaccatttcatcgaccccctcgcaaaacgtcgagttttgctggcagggcggtgagcctaccttatgcgggctggatttttttgcaaaggtggtcgagctccagcagcgttaccgtggtaacaaaatcatcgccaacagcctgcaaaccaacggcatcttgctgaacgataaatgggctcgttttttgcgtcgtcatggatttctggtcggattatccattgatggccctgcgtcactccacgacacctggcgtacgacgggctgcggaaaacccacctgggaaaaagttgtgcaggccatacgctgcctgcagcagcatgacgttccggtgaatgccatggtggtggtcagtcgccagtctgcaagccaggggaaaagtctctatcgctgcctgagccgcgagctaaaccttcaccatctccagtttattcctctcgttgactcccctgctccctggtcagttacccctgagggctggggcaaatttttgtgcagtgttttcgacgactggctggaaaacgatgttggcagggtgtttatccagtactttgataatctgctcggcgtatgggccggccagcccgccacgctctgcaccatgcagcctgtctgtgggcagagtttactggtggagcaaaacggcgatgtctacagctgcgatcactttgtctcagcggaatataaactgggtaatctgaagcaagatgctatggcagcgatggcgagctcgccatttcagcaacagttcgggaagcaaaagggccaactctctgcccgctgtcagagctgccactggcgctttgcctgccatgggggatgccctaaacaccgttttaccatccatgacgacgaagcacagaattacctgtgcagcggctatttaacttttttcggccatatcacgccctatatgaacgtcatgcgaaggcttttattaaattgccagccgcccgcgctcattatgagtcttatcccggagattcggcaaaatatattacaattaacggagtctgaagatgaaagaaccaaataaaatagatggaaatcgccgcgatctcctcaaaggtctggggattgccgctgtcgtgagcctgttaccagagacgggaaacgccgcacaaaataatgccgccgcgaaagcggcatgggatattcctttcaccggcgaaatccctgacacactgcccgaaggctacaatattttactcataacctgcgatcaggaacgttatttcgagcggtatccctttccggtgccgggccgggaacgcctgatgaaaacgggtatcacttttaccaatcatcagaacacggccaacgtttgtacgccatcgcgctctgtcatgtacaccgggctccatatgccgcacacccggatgtttgataatcttggcttcccctggatgaattacgatctggacccggaattacgtaccgtgggccatatgatgcgtgaactgggttattacacggcgtataaaggtaaatggcatcttacccgggagatcgatcagccggtcgctggtaaatcggtagaagaaatggacctgggtgagatcccgacgccgcgactgcatgaaattatggaaaagtatggtttctctgattatcacggcattggcgatgtcatcgggaaaagtaagggcggctatttctttgattcagtcaccacggggcagaccattagttggctacgtaacaccggccgcccgctgaatgatgaaaataaaccctggttcgcggcagtaaacctggttaacccccacgatgtcatgtttatcgacaccgatgagcatggtgagcaggtgcagtggaaagggccaatggataaagaaaaccacaccctgctgccaacccaccccccgcacaaccaaatctatcagcaaagctggccagactatccgctgcctgcaaaccgccatcagccgctcgatgagcctggcagacctgccgcccataaagagtaccagaatgccagggcggtgatggagggacagttccccgatgaagaccggcgctggcgcaaattactggattattatttcaactgtattcgcgataatgaccagcatcttgaggcgattctcaatgaacttgataatcttcaactgacgcaaaatacgattatcgtctttaccgccgaccatggggaactcggaggctcccaccagatgcatggtaaaggttcctcggtgtacaaagagcagatccatgtgccgatgatcattcgccatccggcgtatccgggaaacatccgctgcaacagtttgactaatcatctggatttagtaccgaccctgattggtctgactggacgcgatcggtcgctgcgagagaaagtcctggagggcaggaaaggccgggatatgagcccattactggcgcatcctgagcaagcgggcttaaatgcgctgcgtccgggttcgctttattgttacggcatgatcctgtatatggatgcgcaatacacggcaaaattcagaaagctggctggagaaaaactcccgcacgatcaatttaaaaaagcgatcgcgtcactccatcctgatttttcccatcgctcagggatccgtatgatcaacgatggacactataaatttgcccgctacttttcgctcaagcagcatcatattcctgcttccctggccgagctgctggagaataatgatgttgaacttttcgatctggttaacgaccccgaagaaaatcataacctcgcccgggagccagagaaataccgggatctgttaatgacaatgaacgataaactcaatcagctcactgccgctgagattggcgaagatgatggcagctatatgcccccgtttgaaggaagccagtgggatctgacggcggcccagatgcatcaatatatgcgcgattagcgcttgccgtcaggtgggagaccttaatgtagcagctataaaaaaaccctctgtaaacacagagggtttcgttttactcagctaacgccggggattactcccactcaatcgttgctggcggcttgccgctgatgtcatacaccacgcgggagataccgttcacttcattgatgatacggttggagacgcggccgaggaaatcgtacggcaggtgtgcccagtgcgcggtcatgaagtcgatggtttccaccgcacgcagggaaaccacccagtcgtatttacggccatcgcccatcacgccgacggaacgaaccggcaggaacacagtgaacgcctggctgactttgttatacagatcagctttgtgcagctcttcgatgaagatagcgtccgcacgacgcagcaggtcgcagtactctttcttcacttcgcccagcacgcgcacgccaaggccggggcccgggaacgggtgacggtagagcatgtcgtacggcaggccaagttccaggccgatcttacgcacttcgtctttaaacagctcacgcagcggctcaaccaggcccatcttcatctctttcggcaggccgcccacgttgtggtgagatttgatgacgtgcgctttaccggtggcggaagcggcagactcgataacgtcagggtagatagtaccctgcgccagccatttgacgtcgtccagcttcagcgcttcttcgtcgaacacttccacgaaaacgcgaccgataattttacgcttcgcttccggatcgctttcacccgccagcgcgtcgaggaaacgctgctcgccttcaacgtgaacaatgttcaggccaaagtggtcgccgaacatctccatcacctgctgcgcttcgttcaggcgcagcagaccgttgtccacgaatacgcaggtcaggtttttgccgatagcgcggtgcagcagcatcgcggtcaccgaagagtccacaccgccggagaggccgaggatcactttgtcgtcgccaacctgctgacggatacgctcaacggcgtcgtcaatgattttcgccggggtccacagcgcttcgcactggcagatgtcgcgcacgaagcgctccagcatacgcatcccctgacgggtgtgggttacttccgggtggaactgcacaccgtagaagcgtttttcttcgttggccataatggcgaacgggcagttgtcggtgctggcgacggtcacgaagtccgctgggatggcggtcactttgtcgccgtggctcatccacacgtccagcagtggtttgccgtctgcggtcagggaatcttcgataccgcgcaccagcgcgctgtcgttaaccacttcaacctgtgcgtaaccaaactcacgctcgttagaaccttctacatggccgcccagctgcatcgccatggtctgcatgccgtagcagacgccaaataccggcacgccggcttcgaacacatactgcggcgcgcgcgggctgttctcttcggtggtgctttccgggccgccggaaagaatgatgccgcttggattaaattcgcggatctgtgcttccgtgacatcccatgcccacagctcacagtagacgcccagctcacgcacgcgacgcgccaccagctgagtatactgagacccgaagtcgaggatgagaatgcgatgtttatgaatgttttccgtcattgacgctaattccgaggcaagtgaaacagagtaaataaatcgcccgacgcaaggtcgggcgaagaaatcaggagcccagacggtagttcggggactctttggtgatggtcacgtcgtgaacgtggctttcctgaatgcccgcaccgctgatgcgtacgaattcagctttggtacgcagcaggtcaatggtaccacagccggtcagacccatacaggaacgcagaccgcccatctgctggtgaatgatctctttcaggcggcctttataggccacgcggccttcgataccttccggcaccagtttgtcagcagcgttatcgctctggaaatagcgatcagaggagcctttggacatcgcgccaagggagcccatcccgcggtaggatttgtaagagcgaccctgatagagttcgatttcacccggggactcttcggtacccgccagcatggagccaaccatcaccgccgccgcaccggcggcgatcgctttggcgatatcgccggagaaacggataccgccgtcagcgataaccggaataccggtcccttccagcgcttccaccgcgtcggaaacagcggtgatctgcggcacacccacgccggtgacgatacgggtagtacagatggagcccgggccgatgcccactttcaccgcgctgcagccggcttccgccagcgcgcgtgcgcctgcgccagtggcaacgttgccgccgatgatctgcaggtcaggatatttcgcgcgcgtttcacggatacgctgcagaacgccttctgagtgaccgtgcgaggagtcgatcagcagaacgtcaacgcctgccgctaccaacgcatctacgcgctcttcgttgccggcaccagcgccgaccgccgcgcctacgcgcagacggccctgctcatctttacaggcgttcggtttacgttctgctttctggaagtctttgacggtgatcatgccgcgcaggtggaagctttcatccacgaccagcgctttctcaacgcgtttttcgtgcatcttagcgaagaccacttcacggctttcgccttcacgaacggtgaccagacgctctttcggcgtcatgtagacgctgaccggctggttcagatcggtgacgaaacgcacgtcgcggccggtgatgatgccaaccagctcgttttcttcggtaaccaccgggtagccggcgaaaccgttgcgctcggtcagctctttcacttcacgcagagtggtcgtcggcagaacagtctgcgggtcggtgaccacgccggactcatgtttcttcacgcgacgaacttcttccgcctggcgctcgatggacatgtttttgtgaataaagccgatgccgccttcctgtgccagggcaatagccagacgcgcttccgttacggtatccatggctgcggagagcataggaatattcagacgaatggttttcgtcagctgagtgctgagatcggcagtattcggcagaacggtagaatgagcgggaacgaggaggacgtcgtcaaacgtcagggcttctttagcgatacgtagcatgggcaatatctcgaccagggtggataaatattgccgtggcattatacagagcgtaaccgattgcatctacccttttttgcaaataatacttgccatcccctctgagcgcgttactatcgactgaataacctgctgatttaaagtttgatcttgctcacatgttaccctctcaatcccccgcaatttttaccgtaagccgcctcaatcagacggtgcgtctgctgcttgagcgcgaaatgggccaggtttggatcaacggcgagatctctaacttcagccagccctcctccggccactggtacttcaccttaaaagacgataacgcccaggtgcgctgcgcgatgttccgcaacagcaaccgccgggtcacgttccgcccgcagcacgggcagcaggtgctggttcgcgccaacatcacgctgtatgagccgcgcggcgactaccagattatcgtcgaaagcatgcagcccgccggcgaagggttgctgcagcagaagtatgagcagctgaaagcgcagttaacggcggaaggactgttcgagcaaaaacataagcaggcgctcccctctcccgcccactgcgtcggcgtcatcacctcgaaaaccggtgccgcgctgcacgatattctccatgtcctcaggcgccgcgatcccgggctgccggtgatcatctacccaaccgcggtccagggtgacgacgcccccgggcagattgtgcgcgccatcgcgctggccaacgcgcgccaggagtgtgacgtactgattgtcggacgcggcggcggttcgctggaggatctgtggagttttaacgatgagcgggtggcgcgggctattttcgccagccagatccctatcgtcagcgccgtcggccatgaaaccgacgtcacgatcgctgattttgttgccgacctgcgggcaccgactccctcagccgccgcggaaatcgtcagccgcaaccagcaggagctgctgcgccagctgcagtccggacagcagcggctggaaatggcgatggactatttcctcgccagtcgccagcgccgttttacccagctgttccatcgcctgcagcaacagcatccacagctgcgcttggcccgccagcagaccgccctggaacgcctgcgccagcggatgcgtatcgccgtggagtcacagcttaagcgcgcagaacagcggcaaaagcgcaccgttcagcgtctgaatcactacaacccgcagccgcggatccaccgcgcgcagtcgcggatccagcagctggaataccggctggcggaaattatgcgtggccgcctcagcgagcggcgtgaacggtttggcaacgcggtgacccatctggaggcggtgagccccttagccaccctggcgcggggctacagcgtcacctcggtgagcgacggtacggtgctgaagcagacaaaacaggtcaaaaccggcgatctgctcaccacccgcctgaaagacggctgggtcgaaagcgaagtgaagcagatcgcgacggtgaaaaaaacgcgggccagaaagccttcgcccactaaaccagcggaataaattccacccgttttttcgagataaggccatgcccatgctggcaaaagtaatccaccgcgccgcacgccttcagcacctccagcggctggtggcattccgggcagcgggcctcaagggtaaacaccctttcgcactgggcgcaatgcgcgctactgcctttgacatctaacggcgcgtggcacagagggcaatcaagttccataaccattcctttcaacgtttatctgcacctattttatcatgttccgggtttaatgcgggccgcgtaattgctgctgcaacctgagcagccattccacttcctcaagcctacgctgcgttagcccggccacgctgtccggcgcccggataaacagattatcagcgccgaggatctgctcatcaagacagtgcgtatagatcgccccgggccgggtccagcgctgcacccgctcgccgtcctgtagcgtcaccacttcgccctcaggggcgcgatcgaaggtaattattcgcccgtcccgcagtcctatccgcattcccttttgcccgcccgcgggacccgcgtatttgttgagccagatattgagcgggatagtgcccagggttccctgcagatgcgcctccccctcggcagtgctcgtatccccaggagcaatgtcatggccgaggcggtctttcgccacccgaagggaaaggctcagcgccgtatcgcctccgctggcgtgcagggtttcgcggagcatcgccaggacatgggtgccgatatcgaggatcaccccatcagggtgacgcagctgccgggtatccagctccccggtggcaaaattgagtgcgaccggctcaccagcgctgttaaagccgcttggctcctgcaaataaccttcgatccagacgatatcctgcgctgacaggtgcggcggaggcaggccgctggcctccccttccgcccgccacagcgggccaggagcgttcagcgcaacgcctcgcgccatccagtggtcaagagccagcacccgcgcggcctgctcagtcggcgccagcagcgcccgcagccgggcggcctgctcaaggttggccacgatcggcttttccaccacgatgcgggaaatgccgctggctaacgccctctccagtacgggcagatgctgaagtgatgaggtggtaatgaagagcgtatccaggggttcggccagcagcgccgacagcgaactacagcgctggatccccggcagcgctctgctgcagtccaggtcatagccctggcagcggtcgatgacgtcccccaggcgacgcagcgccggtaaataggcggtttccaccaccgcgccgaggccgataaaaccaatctgcatagtaagtccacctttgagccgctctgttcccggcgaagtatcgcgggattatggcggaaggttttgacatttaccggcatggcggccacaaaaaacccgccgaagcgggtttaatgattatttgcttttcttgatgtgcttgatcaagcgcttacgtttacgcatctggttcggcgtcagggtgttacgcttgttagcgaacgggttttccccttccttgaactggatccggattggcgtgcccatcacgtccagggatttacggaagtagttcatcaggtagcgcttgtaggaatccggcagatccttgacctggttaccgtggatcaccacgataggcgggttgtagcccccggcgtgggcgtatttcagcttcacgcgacggccacgcaccagcggtggctgatgatcttccgccgccatgttcatgatccgggtcagcatcgcggtgctaacgcggcgcgtagcgctgtcgtaggcttcgcgtaccgattcaaacaggttgccgacgccgctgccgtgcagggcggagatgaagtgcacccgggcaaagtcgataaagcccagacgatagtcgagggtctccttcacctgctccttcacttcctgactcaggccatcccacttgttaacgacgatcaccagcgaacggccactgttaagaataaagcccagcagcgagaggtcctggtcggagatcccttcgcgagcatcgatcaccagcagcacgacgttggcgtcttcaatcgcctgcagcgttttgatcaccgagaacttttccactacgtcggtgattttcccgcgcttgcgcaccccagcggtatcgatgagcacgtattcgcgctcgtcacgctgcatcgggatataaatgctgtcacgggtggtgcccggcatatcgtagaccaccacgcgatcttcaccgaggatgcgattggtgagggttgatttaccgacattaggacgcccgacaatcgccagcttgatcggcagatcctgcggattgaagtcgtcttccggctcttcttccgcttcgccattctgctcggcttcgaatttcgcccagtattcggcgtcttcatccacttcttcctgcggattaacctcatcgacccatggcagcagggcctgctccagcaggctggtcacgccgcggccgtgcgaagcggcaatcggatagatatcgcccaggccgagcgaccagaagtccgccatcgcctggtcgacgtcgatgccgtcggttttgttagccaccaggaaggtgggcttttcacgagagcgcaggtgtttagcgatcgcgatgtccgccggcatcaggcccgcacgcgcatcgaccataaacagcaccacatcggcctcttcgattgccagcagcgactgctccgccatccgggtttccacgccctcttccgtaccatcaataccaccggtatcgatacagatgaattcgcggccttcgacttcggcccgaccgtacttacggtcacgagtcagccccgggaaatccgcaaccagcgcatcacgagtgcgcgtcaggcggttaaagagcgtggattttccaacgttagggcgcccgacaagcgcgaccacaggtatcatgttaaatgcctcatacaatcactaagcaacatcgtcttaacgacgtttttaaaaaagtcaaaacggcccctgtctgccaggggccgtttcttaatcactcacgacagcggtaattaacgcgtaatcgcgtacagcgtaccgtctttcgcctggatcagcagtcgaccatcggcaaccaccgggtcggtcaggaagccggagctgtccactttctgctgcgccacaaaatggccatcttccggattaacccagtgcatgtagccttcgctatcgccgacgaccagattgccattatacaacaccggcgcggtcagcaaacggtgcagcagatcgctttgcgtccacagggttacaccgccgtcggtggtcagtgccagcaggcgatcgttctggtcaaccaggtagatacggttaccatcgacgatgaaatcattcaccgaacccagctcgcgtttccacataatctggccgctacgcaggtccagcgcggtcaggttgccgttataagccagcgcataaaccacaccgttaacgatgatcggcgtcgtgtcgacgtcgttcaggcggtcaatttccgtcgggccggtggccgtagaaatacgctgctgccaaatcatctgcccctgctgcatcaatactgcactgacgcggccgttgtcgccgccgacgatcgccgcgccgtaggcggtcgcaggcgcagactcgccgcgcagggagagcgccggcatatcgaggttaacggtccacttcacggccccatcagtctcgtttagcgcctgcagctggccgttgctggtatgcaccagcaccatgccatcgctcaccaccggacgcgacagcgcctcgccggcgacacgggtttgccaggccacggtaccatcgctggtattcagcgcataaagctgcgctttctcgctgccgatataaacatggccgccagagacggtcaccccgccggaaagcagcgctggcgtgcgcgagaaccaaccatctttctccgccagattcaccgaccacacctctttgccgtcgtcggcgttcagcgctttgacggtgcctttacggtcagcagcatacactacgccgtcggcaaaggccggatgaaggttagagtaaaattcgccgataccatcgccaaccgaggtgctccaggacgtggacggcgtaaactggttttctaccgtcggcagcggtgacattttcaccacatcttcttcgctattaaacagcgaacacccgctcagcaaggtaacggaaagcagccctggcaacagtaatttacgcaattgcatcgagtccctctcagatggacaaattattcattttcatacgcatcatttcgctgagcgcaggagaagcatcgcttttcacgccagcttcccacgccgcacgggccccttgcttatcgcctttgctcaacagaatttcgccgcgcaaatcggccacaatggcggtccagccctcacctttgatgctgtcgagggttttcagcgccgcatcagcctgtttcatttgcagctgaacgcgggccagacgcatactgataaccgatttcagattatcatcagatgcggccgccagcccctgctgcagctgcttttcagcgttcggcagatcgttctgttcaacaaaatgctgtgccagctcgagagaggcgaaggcgccgtaggtatttttattgtcagccgcgaatttctctgcccctgacagcacttctggcgtattcgatttcagcgcggaagtcgccttctcgtaagccagcgacgcgtctctggcggtatcctgctgatgggaggtccagtagcgccagccaaccagcgcgccaatccctaaaatcaccccgaccgccagcgctttgccgttttcggcaaagaaacgcttcagcgcatcgacctgatcgttctcgttgttaaaagtttccacgcagtccttctcctgactaataattcccgggagattaacccagaagtgtgcgcaaatgcgcggcaacgctctcctgcgttacggtagtttgctcacctgagcgtaaatccttcactaccacgtttccgtcagcaatctctgattcaccgaccaccagcgcgacgcgcgccccccacttgtcagcgcgggcgaactgcttcttaaagttgccgccgccgtggttggtcatcagcttcacgccgggcagcgcatcgcgaacctgctcagccagacgcattgcagcagactgagtatcggtcccggaggctaccaggtatatatcgacaacaggatcggctttaaattccggattcactgcctggaccagtaaaacaagacgttccagccccatggcaaaacccacgcccggggtagcgcgaccgcccagctgctcaaccaggccgtcgtaacgaccgccggcgcagacggtgccctgggaaccaaggctggtggtcacccactcgaacacggtgcggttatagtaatcaaggccgcgcaccaggcgctggttgacggtgtagcggatcccggcatcgtcaagcaacgcgcacaggccggcaaagtgggctttcgactcttcgtcaagataatcgccgagcgccggcgcgtcgttgagcagcgcctgaacgtccgggtttttggagtccagcacccgcagcgggttggtatacatccggcgtttactgtcttcatccagtttatcggtaaactgctccaggtatgccaccagcgcgtcgcggtagttggcgcgcgcttccagcgaaccgatggagttcagctccaggctgacgtgctcggagatgcccagctcacgccaccagcgcgcggtcagcataatcagctccgcgtcgatgtccgggccctgcaggccaaacacttcggcgccgatctgatggaactggcggtagcgacctttctgcgggcgctcgtgacggaacattggcccgacgtaccacagacgctgttcttgattgtacagcagaccatgttcgatgccggcacgtacgcagcccgccgtcccttccggacgcagcgtcaggctgtcgccattgcggtcttcgaaggtatacatctctttttcaaccacgtcggtcacttcgccgatcgcgcgtttgaataacggggtctgctctacaatcggcaaacggatttcgctgtaaccgtagctaccgagcacctgcttcagtgagccttcaatgcgctgccagagagcggtttcgcccggcagataatcgttcatgccacggatggcttgaatgttctttgccacgtttattctctttatatatacaaaaatgaaccccggcgcctcgcgcccgcaggttcaatcatacacgggaagcgtatcgcttcccaacacgttattttgcttcaacctgttgaacatcaatccgacgggcttcatcgagcatcgaggctttggcgcggatccgcgcttccagctggtcgatcatgtcgttgttgtccaggcgatctttacgcacgccgtcttcatacaggccgcttttcttgttgccgccggtgacgccaagggtggagaccagcgcttcgcccgggccgttcaccacgcaaccgatgatcgaaacatccatcggggtgatgatatcttccagacgctgctccagagcattcaccgtaccgataacgtcaaactcctggcgtgaacaggtcgggcaggcgataaagttaatgccgcgggaacgaatacgcagagatttgaggatatcgaagccgaccttgatctcttccaccggatccgccgccagcgagacgcgcagcgtatcgccgatcccctcggacagcagtagtcccagaccgatcgccgattttaccgcgccgctgcgcgcgccgcccgcttcggtgatcccgagatgcagcggctgatcgatctgtttcgccagcagacgataggattccaccgccaggaagacatcggaggctttaacgctgactttaaactgatcgaagttcagacgatcgagatgatcgacatgacgcatggcggattcgagcagcgcctgcggcgtcggctcgccatatttttcctgcagatctttttccagcgagccggcgttgacgccgatgcggatcgggatgtttttatcgcgagcgcaatctacaaccatgcggatgcgctcttcgttgccgatgttgcccgggttgatacgcaggcagtcgacgccatattccgccactttcagcgcaatacggtagtcaaagtggatatcggcgaccagcgggacgttaacctgctgtttgataagtttgaacgcctcagcagcgtccatcgtcggaacagagacacggacaatgtccgcgcctacgcgctctaacgctttgatttgatttacggtcgccgccacatcggtggtgcgcgtattggtcattgactgaacggcgatgggagccccatcgccaattggcacattaccaacgtaaatacgtttagattttctacgttgaatcggagcctggttatgcatgaaaaatctcccgcgttacccgtctgttactgcgccggtgatgattcggcattgagggtcagacgcgcaacctggttagttctgataaaacgacttaaatcgacaggcttgcccagatactggatctgtaccgcggccggggcgccaattttcagcttatacggcgcctgaccgctcaggttcaggttaccgcctttacgctgcaggccgctgaacagttttttaccggtggcatcgctcacttccagccagcagtcggcggaaaagttcatcaccagatcctgcgccgacgccgccggagtcgtgacgttcgcctgatcggtcggcaacggcgaggctggggtggtagccggagctgccggcgtcgtccccgcggtatcgacattggcctgggaaggcgccacgacagcgttattatccgctggcgtctgggccggcgcgctggtggtcggtgcgctggcggtatcggttggcgcgctgttcgcggcgctatcggcggtcggggctgcaggggcgctggtatccagcggcacgttctggctgttggcgtcgccgccgttcagctctgcggaagactgatcggccatggtcgaaatctcttcctgctgcgccttatggtcttgccaccaccaggcgccgctcagaccgataaccacaaacagcaccagccaggtgaagctcatcagccagccgtcgcgctttttgcggcgcttgcctaaagagaaactctgcattggcgcgactttcgccgcgcggatgggcgcctgcttggccatcatcggcagcagctcgtcttctggaatatgtacgaggcgagcgtaggagcggatgtacccgcgcaggaaggtggaggcgaggtcggcgggggccttatcgtcttcaatatcacgaaccgtggacaccttcaggcataagcgttcggccaccgcttgctggctaagtccgagttgttcgcgggcgtgacgcagacgcgcgcccgtggtgtttgcttcttgatgatcttgagtggcttcagtattcattcgctacaactactggtacgtgaaatttaaagttcagcgcgggaaaaagccggcgccgcgagacatctgtgctacgtcagcctcacagtataggactgtcagccgcgcgatcacagagacgaatcaaaattgaatgctaagcggttgttgtgccgctacatactgcctcaaagtcgacaaaaacgcaccgtaattattaaccgaatcagcgtatttcgcctggctatcggccataaatatgacccgtgccgcctgcgctgcacgggtcatcatttgtcagaccgcttttacgtcaatcgcttcgccctgcatccgcttacgcagcgtacgcttggtacggtcaatgacgtcgcccgccagctggccgcaggcggcatcgatatcgtcgccgcgcgttttacgcacgatggtcgtaaagccgtactccatcaggactttggagaaacggtcgatgcggctgttggagctgcggccatacggcgcgcccgggaacgggttccatgggatcaggttgatcttgcacggcgtatctttcagcagcgccgccagctcatgggcgtgctcggtgccgtcgttgacgtgatccagcatcacgtactcgatggtcacccggccctggttggcgttggacttcgaaatatagccgcgcaccgagttgaggaacgtctcgatgttgtactttttgttgatcgggacgatttcgtcacgaatggtgtcgttcggcgcgtgcaaggagatcgccagcgcaacgtcgatcatatcgccgagtttatccagcgccggcaccacgccggaggtagacaaggttacacgacgcttggaaaggccaaagccgaaatcgtcgagcatgatttccatcgccggaacgacgttgttgaggttcagcagcggctcgcccatgcccatcattactacgttggtaatgggacgcacgccggtggtcttcaccgcgccgacgatcttcgccgcgcgccaaacctggccgataatttcggatacccgcaggttgcggttaaagccctgctgggcggtggagcagaatttgcactccagcgcgcagcctacctgggaggagacgcacagggtggcgcggtcttcttccgggatatagacggtctcgacgcgctgatcgccaacggcaatcgcccatttaatggtcccgtcggttgagcgttgctcttcaaccacttccggggcgcggatctccgccacttctttcagtttactgcgcaggactttgttgatgtcggtcatctcatcaaagtcgtcgcagcagtagtgatacatccatttcatcacctgatcggcgcggaaaggcttctcgcccatgtttttgaaaaactcgcgcatctgctgacggtttaaatccagcaggttgattttggcatctttgttcggcaccgtcagagcggcggtatcaggcgtgacaatttgttcagacataatattttccggcctcgttattacacgttatggccccaggtgggttgaaaaagaaacgccccggagagcgactgctcgtccaggggcgctatattctacaaattctggcgcatcattgccacgtttgcacaaagcaatgaaaaaaaatctgtaactgactgctcaatcctctaaggcttttcgattgtcgcaaggcggcaagcaagtgacaaattcgtcgggaacgaatttgaccagccgtaggctggcctccggtgagaggcaggagcctctcattaatccccgggagcatagataactatgtgaccggggtgaacgcgcgcagccgacccgcgacggtcgaaaagacgaggtttgtatctccaaagtatttcaggtcacagcgagacggcgagttcgcaaatccccgggagcatagataactatgtgaccggggtgcgcgaaggaagccaacaatgctgtggcgtgaaagacgcaggagattagcgagtgcgcgggcaaacctcgccttcagcaaagaagaacgcgatttcgcgggcagcggattctacagagtcggaaccgtgggtgccgttctcggtgaagctgtcagcgtagtcagcgcgcagggtacccgccagggcgtttgccggattggtggcgcccagcaggtcacggtgacgctgtaccgcattttcgccttccagaacggaaaccacgatcgggccggaggtcatgaactcaaccagaccgtcgaagaacgggcgaccttcgtgctcagcatagaaaccacgagcctgttcaacggtcaggtgcagcattttggtgccgacgattttgaaccctgcagcttcaaagcgggaaaagatgctgccaataacgttttttgccaccgcgtttggtttgatgatggaaaaagtacgttcaatagccatgattacctctaattaaatgttctgttgttgcacatacgattgtatggcctggcgcgcattataatgagcatccccgcccctgcctacggatgaaggtaacattttgttaaaataagatgagtattgaaaacacaaaccgccaacaacaaatttaccctggttattgcagggtgaagctggcggccgccgtctgacccgcttcatccatcactaccaactgccactcgccgggtttatccagcattagcgtggttcttgcgccggcggcctctaacggttcgccattaataaaccaccagcgccgcccctccccaccgctggtttgtagcggcaacatcacccgcgcctcacccgggagacgttttatcaccgccccatcacggatgccggacagcaccagcggcgcggtatcctgagtctgtaacggcgggcatgactccgatgccggacccaggcgcgcgcgccgcctttcgctggccggcagccagggatccagcggcagcggccagacttcgacctggctttcccgagcgccgggacaatccgccgccacccgttcgccgtgttcattgcgccacaccgggaagcggatcccgcgtacgctctcctgccccggcagcagcagggtcggcggctggctggcatccaaaagccagctggccaggcgacgacgacagttgctgtcgcccgccggcagatcctgcccgccaggccagcagattgtcccctggctgaccgttgccgggcgcggatcgctcggcagcccgccgcggctcatcgccgggcgggccagcagcagattattgacctggttgagcagcggtacggcgctggcgaagccaaactggcccaccaccggcgtaccgtccgggcgcccggtccagatgcctatcagatatcgcgcattgaggccgaccgcccacgcgtcgcgatagccgtagctggtgccggttttccacgccagcggcaccgcctgcggcagcgaggcatcgggaaccggttgcgcttcgccggccaaaatacgccggacgatccatgctgccccgggcgacatcagcgcgcgctcggtcaatggatcgctcggcttcaggcgcagccgcgccgccttgccatggcgggcgaaggcgctgtacgccgcgacaatatcttccagccgcgccccggcgccgccgaggattagcgacagattcggctctgcgccagcgggcagcgtcaggggcagcccggcgttgcgtaaattagccgcaaagcgttttggtccataggcttcgagcacctgcaccgccggcagattcagcgaccgaaccagcgcctcgctggcgctcaccgggccatgaaacccgctgtcgaaattaccggggcgataatcgctaaaacgccgtggcacatcctgtaatagcgatgccgggtgaatcagcccctcatccatcgccatcgcgtagataaagggtttcagcaccgaccccggcgagcgtaccgccgagaccatatcaatatggccgaagcggctgtcgtcggtgatatccgccgagcccacccagccgcgaactttcatatccgtgtggtcgacgacgaccatcgccagcgaactgcgcggcggcaggcgcgatttccagttcagcgccagatcttccagttgccgctgcagtccggcatccagagtcgtcaccaccttttcatcacgactggtcgccagcgcgcggcgtgaaaaaagcggcgccagctgcggcatctggcgcggaaacagccatactggctcctccatcgcttcctttaccgcctgctccggccagacgccctggctgaccattcgcgtaagcactttatcacgcgccgcctgggcccgctgcggccagcggtccggacgtaaacgactgggcgcctggggaagtaccgccagcagcgccgcctcgccgtagctaagcctggcaggcggcttaccgagataggcccagctggccgcgccgatcccctgcagggtgccgccaaacggcgcgcggttcaaatagagggttagaatgtcgctttttgacagatgccactccagctgcagcgctcgccacagctggcgcagcttgccgccgaaggtgcgtggatggggatcaagcaggcgtgccacctgcatggtaagcgtgctgccgcccgagataactcgcccggaagtaagatcctgccaggcggcgcgcagcaccgcgaagggattgacccccggatggcgccagaaccagcggtcttcatactggatgagcgcctgcagatagcgcggcgacacgtcggcgagcgtgaccggataacgccagacgccctgcgcgtcggcaaaccgccacagcggcgtcccgtcttccgccaccaccacacgggcaggcgtgacgtcatgcagcggcagcggccacaggcgatcggccgccagcaccgccagccacagcagaaaaataaacgccgccagccagcgccagcggcgttttacccgaggcaatacgcgcatttacggcgtcacggtgagcggaccgctggccgctcctgtcgcccgccactgcggcgcatacatcgattccacctgcggctgcgggacctgataagtgcccggcgtcaccgcccgcgccagatagaccagcgtcaccggctggccttcattgacagcgacggcggcgacgaaacggtcatcgcggaactcgatatgctgaatatccgcctgctgcatctggttaagcaggttttgcaccgcgtcgccattctcctgcaggctggcgctgctgttggccagattctggttttccagctccagaccggctggcaacagatcaaccaccagcgcgtcaggcacgttgcgtttggcggtcacctccagcttgacgagcaccagttcgccgctgcgcagtgaagacagcgatttctgctgcccttgggtatcgaaaatagtgcgttcaatccccaggacgttaccgcccggctgcggcgcgctttgcggatagccgctgctgtcgagacgcagccacagcggctgactgccggtattactcacctgcagcgccgccagccgatcgccgtcgaggttgcgggtttgcgctttgtcgccggccagcggctccgcctgcagcgaggtttgcgcctgccagctgcccggcaggtccgccagcgtacgtccggcaaggaacaaggcgttggtttcctgggtcgacagccagcgctggccataggcctcttccgacagcgtgctcaacagctgagtttgcacctccggcagcagcttattctcttccagcagcgccagcttcagggcgttatcgcgcagcgggctaccgtaatcgcccagccaacgattctcatcctggcgcggggtggcaaccgccagcttcagggcggcgtcgccgcgcggcgcatcgcccatagttttcagcgcaatgccgagctgcagcagcggcaagccggatcgcgcctggtcgtgacggctccagatttcacgcaaggcgccgagcggcgctttttgctgacgcgccagcaccagcgcggcgtatgcctgggcggcaaagcggctagcctgggcgtcgtcgctgtagcgcacggtcatcaggcccggctcctgcagatagcgcagcaggcgctcgttgcctttattaatggcgttgaccggtacgctatagccctgctcgctggcgcgcacgaggaagtccatggcgtaggcggtcagccagtactcttccggcccctctctatcccatagcgcaaagccgccgttttccagctgcatctgcagcaggcgtgaaataccgacatcgatggccgcgcggcgtttttcgtcgctgtccccgctaatgcccagcgcctttagctgcgccgcgctggtatacagggacgggaacaggccgctggcggtctgctcaaggcagccgtaaggataggctttcagctcgcggatatagcgggcgagattcaacggtggtttaccgctgagcagcagttggccctgcagcgtttgcggggcaaagccctggctctgcgccgccggcggctgccagctttcacctggctgcagcactgcgccgctgttgacggtctgtgccgggtacgccggacgcacgccgattttccactgtttttgcagcggggcgaaggtttcgcccggcaggctcaggccgctgatggtggcattaacctgaccatcgccgaagcccgccagcgcgctcactggtataaacagcgtgctgcgcgcccccggcgccagttgcaccggcggcagttgaccctcgctcaacgttaccagcccgctggcggtaaggtgaacctgcagggtttgcggtttatcggtcagattgctgagatccagcgccagacgcgtagtatcgccgctggcgaggaagcgcggagtgttcagctcggcgatgaccggggcggccaccaccactttatcttcgctgctgccgaagtcatccgccgtccacgcctgggccatcacccgcagctcgccgttaaaatcgccaatgggtaacgtcaccgtgccttcgccctgatcgttcaataccaccggctgcgcctgctgggcgacgatcgtcacgtggttaaccggcggtttgccgccgcgttttaactcgtcgccatcgccgccgaagcgcaggctggccacacgtccctgcccttcgatcacctggccgtagatgtcatagatatctgcgccgtaacgcttctggccaaagaaggcgttccacggatccggggtagcgtaatcggtgatattcagtaccccgctatccaccgccgagagcaggacattgacctgtttcggcgcctcgccctctttgacgctggctttcactttcaccgtcagcggctggttggggcgcattttgtccggggcctccagcgccagcgtcaggcgacggttttcatcgcccagcggcagatgcagcaggcccaccgcgcgtttcggcgttgccgagcgcgatttatcgccgggacgaaccaccagcgtgctgaggtagaggtcgtggcgattccaggttttatccaccgggatcgacaggtccatcccctccgccgggacgtgaatttcctgccaccacagcggcccttcgctggattccaccattgcgtagcctttacccgccgccggggcggcgatgtgcagcctgatggtgtcgcccggtttatagctcggtttatccagcttcatggtgacccggtcaggacgcgccgcgccggcgccttcgctgttatcctgccagctgtagcccgcccagaagcgcacgctgctgaccacgtcgtccggtcctttcacctccaggcgataggatccccactccaccgggaagctcactttgccgatctggccggcctgcaggtccagcgactcctcgccctcctgcagatctttttgatcgaactgcgactgccagccttcgctgtcggaccagttccagtagtagtcgcgcctctcgcggatcagccgcacctggagaccggagatcgcttttttctcgcctttgacgtcggcatagacgatatcaaacgcggcgttactgttttcatccaccaccggctgtttcacggtggtatcggtgcggtaatcgtaaacgtccttcagcgtaaattgcgggcggatccccggcagcgcctcggcgggccagatcggctgcttaaccgtacgggtcaccgggcgaccgccggattccagcaggctggcctgcagcaccacctgcagcggcgaatggctatcctgccactggcttgaggtggtcacttcgccatggcctttttcgtccagcgtcagctggacttcatccagactacgggagaggttttcttccgcaatatcgccgaactggaagcccggcagcgcagcgacggcgtcgcgcagcgggcgcaggaacagcttgccctgcagctggttgccgctggccggcgcgccgtagagataagcgccgctaacgccaaaggtgacgtcggcatccggcgcgactggcgcggcctgcggcgtcaggttcagggccatgcgttccggcataaagtcttcaacgtggaaatcccattcgcgcggctggttgtcgccggcgctggcgcgaatgtgccacatgccggtaaccgcgccgctgtcgagcggataagtaaactggtacaggccattcactggtttgctcatcaccgagcggatcacctggccgtccggctgaaccacctccagtttcaccggctgctccgccagcggcttgccgtcgctatcgcgcaacagcgcattaaggatcaccgtttcgccgggacgatagagatcgcgcgggccaaacataaagaactgtttgctaaagccgggcgcgcctgcgatagagaattccgccagatccagcgccggcagcttgaggtcgagcagcgtggtctgcccctctttgcgcgccagcagcagcgcggcttctttatcggtttgcagggtgacgtggccctggctgtcgcttttcgcttccgccagggtctgccctttggcattgagcaactgcatctcaatgcccgactgggcggcgccgttttccagactctgggtaaaaacgtccagccggttatggtagcgatgcgccgagacgccgatatcgctgagggtaaacagcgtcgccgcgttgctgtagctataacggcccgccgggttcatgaccgccacgtagacgccaggctgctggagcggcttgatgtcgctcagcggcagcagcagcttttcgcgagtattacgcgccgggttgagatcgaagcggccgctgtagaccagatccgccatcttcagcagttcatcagattcccagttgcttaacgagttacggtattcccactgactgacaaaggcggagagcgattccggcttaatgcggaagaaattaacgtcgacattatcgacgttcagcgccatcaccggcagcccggcgaccacgttgcccggcagcagcgagccgcggctggcaaacccaacgctcggtgcgatatcgcgggtggtcagggtcttctcaaacggtttatcgagcgtcgccttgttcagggcggtcagcgtcgggtcgactgagacaatcagctcgcgctttggctcaaggtgacgcagacgcagctctttcagattcggcgccagctcccaggcaccgtccaccttaccgcttttcttgtcgaccagatgcacgctgcgcgagaaatcctggtccggctgcagcgggacggaaaacgtcagcaccagggtcgcggcgccatccagttgcacctccgaggcgtcgaggagcgtcagcgctttaccctggcttttttccgccagcgccgccagctgggcgcggtccggttttgccgtcgcgcctgggttgctatccgcggctggcgccggggccgaggcctgcggtgtaccgctgtcatcacacccggttaatgaaaatgcggtaaggagcgctagtgatagcgccgctaaacgaaatggtttcatccttctaacccctcggccgatgagcctgatgcaatttgtcacatttattatgcgttatggcggcgcttctcaacagtgacgaagcgggtttctgccgattaatcagaaaagtgccgtgacgccgtccccactctggcgtccttaacttgtcagcgccagctaaaacgccgacaattcagtcatgaataataaaacggaggcacctatgtccacctcgttttttgtcgctgccgactggctggcagaacatattgatgacccggaaattcagattatcgacgcccgcatggcgcccgccgggcaggaggccctgcgggatatggccgcggaataccgcgccggccatgtgccgaacgcgctgtttttcgatatcgaggcgctatccgaccacaccagtccgctgccgcatatgatgccgcgggccgaagcgtttgccgtcgccatgcgcgaactgggcgtctgcagcgataagcatctggtggtctatgacgaaggcaatctgttttccgccccgcgcgcgtggtggatgctgcgcacctttggcgtagagaaggtgtcaattctggccggcggactggagggctggcggcgcgacgaactgccgctggaacaagggatgccggaggtggccgaaggggaattcgacgtgcggttcgatcctcaacaaattaagcgtctgaccgacgtcctgttggtcagccatgaaggatcggcgcagattgtcgatgcccgtccggcggcccggtttaacggccaggccgacgaaccgcgcccgggcctgcgccgcgggcatatccccggcgcgctgaacgtaccgtggacggatctggtgattaacggcgaactgaaaaccgttgacgagctgaacgacatctttttacgtcagggtgtcgattttgaacggccgatcatcgccagctgcggctcgggggtgacggcggcggtggtcgtgctggcgctcaccacgcttggcgtgaacggcgtctgcctgtatgacggctcctggagcgaatggggcgcgcggagcgatctgccgattgaaccggcccctgccgctccgtaaacacggcgtgaccgcgggcctcccgttccgcggtcactaaataatttctgattttctctcccactttcttctgcttctcgctaaaccggttactctgtgctgccgcagggcttgttcctgccgagttcgctttgcctgatggggaggcagagcactggtacagaattcctcagggctgatagcgcatccagtccatcccaatctgatgtcaccacaaggagtgaaaatggcattagtctctaacccacattcggcttattcaccgcgccttccctggctgggaggtatagctggcctgctggcaggcggcgcgatcctttatttttggccgcaatggaaccggacatggctaagcctggtgcctgcgccagtctccgtgtatacccgctttctcggggtcactctggaagaggtcccactgatcacctatggtcaccaggcgctgctgggttttctgatggtgctgctcgcgcccggttacggtaagtcgacccttgccgcgtggatgatgcataacccagcgtcaagccggcgctggcccggcgaggtattccgtgcctgggtcacaaaatttggcctgctggtcatggtcttttgcaatctgttctttttgtcccgagtcccatccggaaccctggcgttatatatttttattctccagcacatcagcgttgccgcggcggtggcgtcaggggtgctgctcctgcgtgacgcccggcgcctggcccggacgttcgacgctcagctggcggacttgcgtcttctcatgatacttaccctcgggttccagacgattttgccggcgcagatcgcgctgatgagcgcccgggacgtgaatacgccgctgggctggtacattgttatcgcgcaaatggcaggggtgttactggcgtttatgctggtcggcgggctggtggcagcgctacgttctctgctgggcgaagagaggtgccgggcctggcgcggggatatggcgctcttcaacggcattgtcacactgtgcgtgacgggatttctcctctatcacatggtgtctgcctatccgcgaatctttgccgccctgcattagcttttgccaccccgcttttgtgcctcgaactggaagcagaaagaaacagcgggggctgccgcccccgctgtcagatgatgcggttctgcttaaaatcgcgcaggaagctgccccagcgcttttcatagaacggcgtgatatgggcaatcataaaatggctgatgcccttctcgccttccaccacctggcaaatatcgatcggttcgtcgcctggcaaggtatcggtggccacgctgccggtggtctggataatggcttcaatatccccttccgcttcaatcccgatcaataagttggccggcgcatcggcgcgctctttaatcgagcacagaaacgcccgcttgacggtcttcagcgttttgaacaacgtggtcagcgaatcgaccatctgcgccggcggttcggcgacttcagacagcagcagcgcttcgccgccttccagtaccgtctgggtgctcagtgggctgccctcttcgcctaacagatggctgatttcccgtggggtgaactctttgccgctcggcagcttcgggttgaggaataacgattcgcccagcgtcatcgccatcagcgtgcgggccggcatcatcacgaaggcctgttcatccgccaccgcctgctgcagcgcctccagcgaggtaaagaatgggatcaccgaggtaccgtcgtctttttcccaatgctgcagatccagcgcgctatcttcgacaatctgctcgccatcggctgccctgcccggcacccagacggtggcctccagcagcgcgctgaaaaatgccggacgatgggcgggctcagtcgccgctttttccagcagggtttctaattcattttttgtatctgacatagtttggctacttcacaatgaattgcccggcggccattcgtccacgcgggcatatggttttcctggccgggtaagcgcgggcgccacccggccaggccattactcagctgtcagcaggttagcaatggtacgcacgccaagcccggtggcgcccgccgaccactgctcaacggcagatttgcggtaggttgccgaacagtcgatatgcagccaaccctgatggtagttttccacgaagtgggacaggaagcccgccgcggtgctggcgccggccggataggccgcgctgccggtgttgttcaggtcagcaaagttggacggcagctggttgcggtggaactcggccagcggcagacgccagaaggcttcgttttccgcctgagcgctcgccagcaggcgattcgccagcgcatcgtcaaagctgaacagcgcgtggtaatcattgcccaacgcggttttcgccgcgccggtcagggtggcggcgtcgatgatcagctctggcttctgcgccgaggcgtcaatcaggccatccgccagcaccaggcggccttccgcgtcagtgttcataacttcaacggttttgccgttgcgataatgaataatatcgcccagtttgaaggcgttaccgctgatcaggttgtcggcgcagcacaggtagagcttcacgcgtttgttcagcccacgggtaatggcaaaagccagcgcgccggtgatagtcgccgcaccgcccatatcggatttcatcgaatccataaaggcgctttgcttgatgctgtagccgccggaatcaaaggtgatgcctttgcccaccaggcaggcgtataccggcgcctctttatcgccggtcgggttatagtccagcgccagcagaaccggcgggcgctcggagccgcggcccacggtatgcagaccaagatagccctgctcgcgcagatcttcgcctttggtgatgcgatagcttatcttctcacccgccacgccgcacagcaggtcgacagcgcgctgcgccagctgctccggacccagctcttccgccggcgcattgatggtgtcgcgcacccagtcgatgatcgtcaggcggttatccagctcgctgcgctgcgcgtcgtcaagggatggccattcgacctgacgctgacctttcggccctttatagccggcccaaaaggcccaggcgcgatcggtgttccagccttcgccgctcagggcgacgtgcttgatgcccatgccgtcaattttgcgcgccgcgcgctggataagcccgaggtcgtctttaccgttgagatgtagagcgatgccgtcgttattgatgctccaggtcgctttttctccccagcgtccatcggctggctgagtagaaagcgtaatcttcatagcttcggtcattatcattatccttcttagcaaacgggccaccctatggcagcccgttaaaatgttttcgcttaacgcgaaattattcggcctcgtctagccagactagcagaatcgcctcgagaattttttcattggatgcgtttggatcatcatcaaactcttccaaatcgcaaatccactgatgcatgtcggtaaagcgaacggttttcgggtcgagatccgggtaagcgtcatacaaggcttcgccgatttcgcgactgtcggtccatttcagtgccatattagtgctcgcgtgcgtggttgatggtgtaacgcgggatctcaacgaccagatcttcgtcggtgacgcgcgcctggcagctcagacggctgtcaggttccagcccccaggctttatccagcatgtcgtcttcatcttcgctactttccgccagcgagtcaaaaccttcacgcacgatgcagtggcaggtggtgcaggcacaggatttttcgcaggcgtgttcaatttcgataccgctacgcagcgcggcatcgagaatggtttcaccggtctcagcttccacaacgatgccatccggacacaggtcctggtggggcagaaatacaatttttggcattttaaacctcgtccacggattggcctttcagcgcgatacggaccgactgatccatacggcgagcggcgaattcctgggtttgtgtgtcgatatttttaatcgcttctttaatcgcgtcagcgtcgtcgcctgccgcggcggcgcgtacctgctccgcagcggcatcgatggcctgacgctccgcggcgcttaacagcgcggcgtcggcggccagcgcgcttgtcaggctctccagtacgcgcgcggcttccactttctgttcagccagcatgcgcgcctgaatatcctgttcggcgtagctcatcgaatctttaatcatggtggcgatttcgccatcggtcagaccgtaagacggtttcacctggatggaggcttccacgccggtcgatttttccatcgccgtaacgctcagcaggccatcggcatccacctggaaggtaacgcgaatatgcgccccgcccgccggcagcgccgggataccgcgcagcgcaaagcgcgccagcgaacggcaatcctggaccagttcacgctcgccctgcatcacgtgaatggacatcgccgtctggccatctttgaaggtggtaaactcctgcgcgcgggccaccggaatggtggtattacgcgggatcactttctccaccaggccgcccatggtttccaggcctaacgacagcgggataacgtcgagcagcagcagttcgctgtccggcttgttgcccaccaggatatcggcctggatcgccgcgccgatggcgacaactttgtccgggtcaatggaggtcagcggagtgcgaccgaagaactcgccaacgcgctcacgcaccagcggcacgcgggtcgaaccgccgaccatcaccacttccagcacttcttgcgcttcaacgccagcgtcttttagcgcccgacggcaggccatcagggtacgttttaccagcggggcaatcagatcgttaaactggctgcgggtgatatcgccctgccagccgccgacctcgacgtgcgctgcctcggcatcgctcaaggcgattttcgccgcgatggcggcatccagcagctcacgctgcagacggttatcgctgcggtcgctgaagcccgcctgctcgcgcaggtagtcagccagcaggtgatcgaaatcatcgccgccgagagccgagtcgccgccggtggccagcacttcaaacaccccgcggcttaaacgcagaatggagatatcaaaggtgccgccgccgagatcgtagaccgcaatcaccccttcctggccggagtcgaggccgtaggcaatagccgccgcggtcggctcattgagcaggcgcagcacgtgcaggcccgccagacgcgccgcgtctttggttccctggcgctgagcgtcatcgaagtaagcgggaacggtaatgaccacgccgtcgagttcgccggccagcgcttcggtcgcccgggcggccagcgctttgaggatatcggcggagacgcgaatcgggttcagcaggccgccggccgtctggatcatcggcaggccgttttcactggcctgcagctgatacggcagatgcgggtaacggttttgaatatcggcgagagagcgccccatcatccgcttcacggagctgatggtattggcaggatcctgagcggcgttaagccgggcgtcatagccgacggtcagccccgaagcgtggtagttcaccaccgacggcagcagatagcggccttgatgatcgggcagagtctcggcctggccgctacgcacggtagccaccagagaattggtggtgcccaggtcgataccggccgccagacgacgctggtgcggcgcggcgctcaggccgggctcactaatttgtaataaggccataattgcttccgaaaattaaaaatcgagcagtttttcttcgagttcttcagcactgctgcgcagtttatcgaggaaacggagcttacgaaccgtgtccgccgccgcctcccagctctcattatgcaattggtcaaccatcagctgctgacgggtatcaaacagcgctttcacccgtttgataaaaccttccagccgcgcgtcgtctttcgcctggccgatctcatccagctcttcgcgcaattccagctgttccatcaggaacgcggtatcgcgaacggtatgctgctcgctggccagatcgaagccatgcagcgaaaggagatattctgcgcgagtcagcggatggcgcagcgtctgccaggcctggtttatagtggcggaatgctgaaccgccgcaagctgttccgccgcaggcgcgctggcaaatttatccggatggtactggcgctgcagatcctgataccggacagccagttgttcaagcgagagggtatagctggctggtaacccgaagagggtgaaatagtccatagtaacctcagggtcatgcatctaaattaaaaccccacgcacggcgtgaccgcggtggggttgaggagtaccgattatacgttaaagctttcgccgcagccgcactcatctttgacgttagggttagtgaatttgaacccttcgttgaggccttctttgacgaagtccagctgagtgccgtcgaggaattgcagacttttgccgtcgatcacgaccttcacgcctttgtcttcaaacacggtgtcttcagccgccggctcgtcaacaaactccagtacataggccatacccgagcagccggaggttcttacgcccaggcgcaggccaaaccctttaccgcggttcgccaggaaggcattgactcgcgctgctgcactgtcgctaagagtaatcgacataacaaaacctcaactaattattttgcttcacgtttgcttttgtaatccgcaatcgcggctttaatcgcatcttccgccaggatcgagcagtggattttcaccggcggcagttccagttcatcggcgatatcggtgttcttgatcgcctgcgcttcgtccagcgatttgcccttcacccactcggtaaccagggagctggaagcgatagcggaaccgcagccgtaggtcttgaagcgcgcgtcttcaatgataccttcattgttgactttaatctgcagcttcatcacgtcgccgcaggccggcgcgccgaccatgccgctgccgacgttctcgtcgctgttgtcaaaagagccgacgttgcgcggattctcgtaatgatcgataactttttcgctgtaagccatgatgaattctccttattggtgccgaattagtgatgtgaccattcaatgctgttcagatccacgccctgtttgaacatttcccacagcggagaaagctcgcgcagacggccaatggatttgcgaatcagatcgatggcatagtcaatctcttcttcggtagtgaaacgacctaaagagaaacgaatagaactgtgcgccagttcatcagtcatgcctaacgcgcgcagcacgtaggatggctcaaggctcgcggaagtacaggctgaaccggaggaaaccgccaggtctttcagcgccataatcagcgactcgccttcaacatagttgaagctgacgttaagaatgttcggcgcgccctgctcgaggtcgccgttgaggtacacttcttccatatccttcacgccgttccacagacggttgcgcagcgtgcgcagacgcgccatctcgctttccatctcttctttggcgatacggtaagcttcacccatgccgacgatctggtgaacaggcagagtaccggaacgcataccgcgctcgtggccgccgccgtggatttgcgcttcgatacgaatacgcggcttacggcgcacgtacagcgcgccgatgcctttcggaccgtagattttgtgaccggagaaggacatcaggtcaactttcagctggctcagatcgataggcagcttgcccacgctctgggtggcgtctacgtggtaaatgataccgcgggcgcgacacatctcgccgatggtagcgatatcctgcaccacgccgatttcgttattcacatgcatgatggaaaccaggatggtgtcgtcacgcatcgctgcttccagctctttcagatcgataatcccgttgctctgcggcgccaggtaggtcacttcgaagccttcgcgctccagctgacggcaggtatccagaaccgctttatgctcggttttgctggtgatgatgtgcttgccttttttctgataaaagttggctgcacccttgatcgccaggttgtcggattcagtcgcaccagaggtaaagacgatttcgcgcgggtcggcgccgaccagctcggcaatctgattgcgggcgatatcaaccgcctcttcagcctgccagccaaaacggtgggaacgggaggccgggttaccaaaggtcccgtccatggtcaggaactgcatcattttctcggcaacacgcgggtccaccggcgtggttgcggagtaatcgaggtaaatcggtaatttcattgctcttaaactccgtacatcactcaatgcaaggaatcaggcaaccggcttgatgtacgaccgagtacacggaatgtcggagcatcccggcctgattctgaaagctctttataatcgttgtcccgccgtttcgcgccgccttgccctgtcagccgcagcccgaaacgggacgggtcactcaggcgcgcagtttaacgtcaatcgcgtcctgggtgcgcgcattgcgctgggtttcgtgctgatgctgacgaccggaaacatcgaggatctcctggttattcaccagttccccgagggtgatattgttcaggaagccggtcaggcgctcgctcaggtcgcgccacagcgcgtgagtcaggcatttatcgccgccctgacagccgcccttgccctggcaacgggtggcgtcaatggattcgtccacggcgctaatgacttcgccgacggcgatactgccggcgtctttacctaacagataaccaccacctgggccacgaacgctggaaaccaggccatttttacgcaggcgagagaacagctgttccagataggaaagcgaaattccctgacgctctgaaatatctgccaacggcaccgggcccgtttcagagttgagcgcaacgtcaagcatcgcggtcacggcataacgccctttagatgtcagtctcatgtcttacttaacctcaaactcgcccctggccgggctttttattaatatgggtattgcatagcagggccaagtctgacattcccgagtaatttggtcaactatttacttgactgttttagtcaggtatttggctttccgtgccgttttacttccgcatagcctgataccttcatcccgccaggcgagcccgattcgttgcccggataagcgaagcgccatccggcgttaacgcggttacttacctttattctgctgctcaatagacgccagcatgccgcgcaggatgttcaactcctggctttccggacgcgcgcgggtgaacagacgacgcagcttgttcatcacctgccccggatgattcgggcggataaagccggtcgccagcagcgtctgctcaagatggtcgtagaatcgctccagatcgtccaccagcgggtacggcgcctcttcatgctcaaccgccggctgcgcttgctcctgcgccgccagccaggccatccgcacttcataggcgataacctgcaccgccatcgccaggttcagcgagctgtactccgggttggcggcgatcgccacgtgatagtggcacttctgcagttcatcgttggtcagaccaacgcgctcgcggccaaagaccagcgccaccggcgcatgctgaccttcggcgacgcttttcagaccgcattcgcgcgggtcgagcatcggccacggcagcgtgcgggagcgcgcgctggtgccaaccaccaggctacagcctgccagcgcttcatcaagggtatcgacaatctgcgcgttgccgatcacgtcgctggcgcccgcggccagggctatcgcctgcgaatcgggtttgaccagcggattgaccagccacaggttagttaagcccatggttttcatcgcgcgggctacggagcccatgttgccggtatgggaagtttctaccagtacgattcgaatattttgcagcattatggttcttcggctaaagattattcgtgcatgctaccataaaacggagacataagcagatttggctgctattatatgcgccgttttttcccgttctttaacatccagtgagagagaccgatgcatccgatgctgaacatcgccgtgcgcgccgcgcgcaaggcgggtaatttaattgccaaacactacgaaacgccagacaccgtagaaaccagccagaaaggcagcaatgattttgtgaccaacgtcgataaagccgccgaagcgattattatcgaaaccattcgcaaatcttacccgcagcacaccattatcaccgaagaaagcggtgaacacgctggcgaagagcaggatgttcaatgggttatcgatccactggatggcaccaccaacttcgttaaacgtctgccgcacttctctgtttccatcgccgtacgcatcaaagggcgtactgaagtcgcggtggtctacgatccgatgcgtaacgaactgtttaccgcgacccgcggccagggcgcgcagctgaacggctaccgtctgcgcggcagcaacgctcgcgacctcgacggcaccattatcgcgaccggcttcccgttcaaagcgaagcagcacgccaccacctacatgaatattctcggcaacatgtttaccgaatgtgccgacttccgtcgcaccggctctgccgcgctggatctggcctatgtggccgccggccgcgttgacggttactttgagatcgccctgaaaccatgggatttcgccgcaggcgagctgatcgcccgtgaagctggcgcgattgtctgcgacttcaccggcggtcataactatatgctgacgggcaacatcgttgccggtaacccgcgcgtggtgaaagcgatgctggcgaacatgcgcgagcagctgagcgacgcgctgaagcgttaatctcttactgatgtcaaaaaggaagccgcggcttcctttttttatgtcattttatcatgttgaggatctggcgaatcaccgcattgccgccgatgcacagtaccgtcaggccgctaaacaaggccagcggtccgcgccagcgcagacagccctgcggccccagccagcgccggaaacacagcgctatccctaccaccgtcagcctggcgagcagcacgccgaccatcgccggaaccagcagcagccatccccacagcggcagctcatactgctgcgcactgagtaaaatccataccagctgaaacggcagataaaagctcagggcaaagatcagcggaatgcgaatattgcctgccggtgcggcaacgccctgaaagtcgcgccagccgtcgcgcagcagtattccagccagcaccagcgtggccagatagcatacgtcgttaaagatgcccacgatctgcattagcctgtcgctgcttagcttacccataaacgcgaaacgccagaaaatgatcaccagaaaaccgaactgcaacacccagctgcgcaggatccagtcgaccatctcccgcggcgagggctggttatgcacagcccaggcaacaatgggcagtttactgtgaccgggatgacaaaaggccagcacgaagcccgacagcgttagggtggcgtaggccaccagcggaatatccgcgacactcgccaccccgaatcgcataacatacggcatggcgtggtagacacgcaccagatctgacggccaccagctggccagggatggaaaccagaatacgatcgccaggcccgccagcagcccggcggcgccggcgcagccataatagaaccgcccgctctgcgcgggagaaacgatatttgcggccatagcgactccttgtcatccgccgaaaagcggaaaactagagcatcgcttcgccagcggcaagcgctggcgcccactttaggatttgcgcccggcgtctgtctaaaacggacggatcccaccgccggcagggacggcgctgagccacatcacccctgccgccgccagcaatatgacgccgccggccagcgccagcgtcgcccaactaacctgcttccataacgctggcgcctgatggcgactgaggcggatcgccagttggcggaacccatgcaccaacagcgccagcgccgtgatagtcaacgaggttcccgccgccatcgccagcgccgccgccatcccccagccaaaaacgccgattaccttgctgaacagcagaaccatgatcgcccccgagcagggacgcatgcccatcgacaggacaatcgcggcgcgagcccgccagtcgtcgccggcctgcagctgctccggggccgggagatgctgatgcccgcagccgcagtgttcgttatgaacatgatgcggggtaaaagcggtaaacgttggccggcgcagcagcagacgcagcttttttaacgcccgccagcacagcagcagccctaacgcacccaccagcaaatagctccccttctccagccagaaactgctgaggtgcagctggcgcgccggcagctgcagcagcgccagcaccacgaccaccagcgcgatggccaccagcccctgtaataaagaggcggccagcgtcaggccaatgcttgatttcagcttcgcgggatgggtggcaagccaggtcgtaatgacaattttaccgtgtccgggccctaaggcatggagcaccccgtaaacgaagctaaaccccagcagcgacagccctgccgccgccgggttctccgccaccgcctgcagcaggcggctgagttccagattgagcgaacgctgccagactgcgctctgcatcagcacctgcggccacgcccgccacagccaaatgccgccgatgatgctcacagccagcaacagcgccagcggccacagcgctttccagcgcgaagatcgcgcacgcggagtaaaaattactgacatgtcagggtcaccttctgggcaaaatagctgcccagcgccatatcctccggcggcgcatccgctttatccagcgactgggcgtatgagagcattttgtcgttcggttttggcgtcatcaccgttgccttacaggcggcccgcagccctgcgggcagggaaaaatcgctatccttgtcataaaacatatcgacgtagtaggtcgggtcgaaggtggaaaaggtaaacgtctgcccggcaatgggttgcggcgtcgccagcggcagagtaaaggtgagtaccgcctgcagtccgtcacgttcgaggccgtaaccgtcgggacgattgtcaaatttaacccgctgaccgttatgccacagctcgctgaaatagtgctgaccgagcacgttggccatcacctccgccgccagctttttccagacttcgctgcccggtttggcgtttccggcatcatagagcagatccgatgaggtaatttcatccatcgtccagcgcattttaaaggcgctcagcagaccgtccttgaccaccggctcgctttgcaggctgatgaagctatgcggatgcgcagcggccgaccatgataaaaccatgaaaaacgccgcgcttgtgcattgtttcactctgttcatctgttcctcacgtgaaaaattctgtgaacttcgccagcaatcctgagtaaaagcggacgctcttccctgcccacgccgcggtcattgtctatccttagcggaaaccctaactggaacttaccagatgatgaccgtcattgaaccaccatctgcgctttccagtccacagcgccgtagccaggtgctcctgatgttttatctgcccggacagtcggtgacgactgaacggcttggcaggatcaacctcgttgatgagaccacggcccggcaggatattgaggagaccggacgcgaaattcagcgttaccaccgtttgaccctccagtcacaggtggacggcagctatcggattgaaggcgccgcgctcgaccaacgtttatgtctgctgcatgcgctgcggcgggggctgcgcctctgcccacagttcgttaatcatcattttaccccggcgctgaaaacgcagcttaaacaggaaggcattgcccgcaccttatacgatgataccaatctgcaggcgctggtgaaccgctgcgcgcgggcgctcaatcgccagtttgactgccgcgacgtgcagtttctgcgcttgtacctgcagtactgtctgctcgaacatcaccggggatactctccggacttcaatgaggaacagcaacgctgggctcaaaccgccgccgagttcaccctggcgcaggagattgtccgccactggcagcgtcgggtcggcgctccgccccatgtcggagaaccttttttcctctcgctgctgtttatgttgctcaaaacccccgacccggtccgcgacggtcacccgcacgatcgccgcctgcggctggctatctccggcctgatccaccgctttcagatcctcgctggcagagcgttcagtgatgagcaggggctcagcgatcaactctatatccatttgtcgcaggcgttgatccgcagcgtgtttgctatcggcatcgacagcacgctcacagaggaagtgacccggctctaccctcgcttactgcgtaccacccaggcggcattgagcgaattcgaggaggcctggcacatccgttttaatgaggaagagaccggtttaatcgcggtgatctttggcgcctggctgatgcagaaaagcgacctgcacgagaaacaggtgctgttgctaaccgatgacaacccagctattgaagaggccctggaacaacagctgcgcgaactaacgctgctgccgctgaatatcaaataccagagcgtagagcgctttcagaaggaaggtgcgcccaaaggggtgacgcttatcgtcaccccctatgcgacggcgctgccgctgttttcgccgccgctgatccacgcggagaactacttcactgaacgccagcagcagcatatctgcgccatgctcgaggactaggccgccaccgcttttggccgtatagccatcgccgggagcgtcagcagggccatcacccaaaatacgccctggtgcaggttctgatagaggaaaccggcgaagacggtcatgatggcaatactgccgcccatcgccaccgcggagtagacggcctgcagacggatcacttcgctaccctgacgggcggcgatataccgcatcgccgccagatgacacaccgtgaaggtgccacagtgaaggatctgcgcaaggatgagtcccggcagcgccgtggtccagcccatcagtccccagcgaatcagcccgcaggcggcggagagcaacagcaggtcgcgggcgctgaagcggcggaacacctttttactcaacgcgaagatcaccacttccgccaccacgcctaacgaccacagataaccgaccgccgaggcggaatagccggcctgctgccagtagatggcgctaaagccatagtaggcggcatgcgctccctgcagcagacaaacgcaggcgagaaagcgccagctttggcgcaccagcgtcagccaggccgccattccggccccctgctgctggcgcgactccccctggggcatcaccgacggcttaagcagcatgccgagcagcatcgaggcgacccccaggcttagcatcagcaggatcgcccggtaatcgaacaggctcaccagcttgccggtcagcgccgaaccaattacaaaggcaatagagccccatagccgcacccggccatagtccatggtgatctgcttttgccaggtgttggccagagcatccgtcagcggcaccagcggcgaaaagaacaggttgaagccgatgatgatcgccagcagccatgctacgtggctgccggcccagaaggccagcgcgaagagcaaggttaacagcgccagcacgcgcagcgcggcgatcagccgggagggatcgctcacccgcggggcaatcagcagactgccgagaaaacgggccaccagaccggcgccaagcaaaatgccgatggtttccggagtcagcccgtttccggccagccagacgctccagaagggcagaaaaataccgtagctaaaaaagtaggtgaaataactgagcgccagccagcgcgtggagtgcaagaccatgatttcctcccgaatggtggcgatagtctggcgataaaccccggcgggcgcaagatgctcttgtctgctgatagctcgttatttatgccccctcgatgatgattttcagcgaaaaattcagcttatctcccgcgcctaaaactcgcagccccggctgcccgtccatgttgtgggcgtttaccggatggctttgcggctcgaggcaaaggaatgattcaccttgcattctgaacagcatcaaccacggagtttgcgatagaattgtgatattcatcacgtcattgcttaccctcgcccgcccgccccagccggaataacccacgttcagccaacgatcttcaccgaactgagccacgctgaaattggcatagtcgggcaagtttccttgccagttgagaggtaagtgattctccccttccggccagtaaccgctgacctggaactgaaccttgctgcgttcatcgaaagggaaaaagggatgaaagccgcagccgtaaagcgcagggacctccccatagtgggtaagcgttagctccgctataagctggttacgcagcaactggtagcggagctgcgccagataatcgaaaccgcaggcatgctgccgacgcagctgtaatacacaatactcggcgccgtactcaataatatcccagcgctgtaaccagccgtcaccgtgaagaaagaaatactcgtcggcatggtggcaaggcaggacaatctcctgcccatgaaaaataaaacggttgccggcgacgcgattggccaatggcagcatcggaaacatgccgccggcgggattttcatatagcaccggcgcttgatattgccgcgagaataaactttgcactttgccgcccagagaagagacgcacatccgcagatgcgcgttctccagaatccactcttccgccattagcgcatctgctcctgcttcgccgcattcacgcccgtatgacgctgcgccagctgctcttccagcgcttcgagggtgatacctttcgtttccgggacgttgcgcaggatatagaggtagccggcagcgcaaatgacaccatacagcaggaagcttcctgccgcgcccagaccggcattaagcagcgggaaagtataggttaacaggaaacaggcgatccacagcgccagggtacctaaagacatcgcgagtccacgtacgcggttgggaaaaatctccgccagcagcacccaggtcaccggcgccagggtcaacgcataaatagcaatcgccgccagcaccagcaacagtaccggccaccccataatgcccatggcgtaagcgccggcgatcagcacatagatcagcgtcaatcccgaagcgccaagcagcattaatttacggcgaccgattttatccaccagcggcagcgccgcaatggtaaagaccagattaacgacgcccgtcgcgacgatcgatttcagcgtgctgttaatatcgaaccccgccgaggcaaaaatctcctgcgcgtagttaaagatgacgttaatcccacaccactgctggaatatggcgagcaccatgccaatgatcacaatcggtttcacctggggagccaacagcgcgccgtaggagactttattgttatccttttccagggtatgcgcgatttcacgcaggatcctgtcggcatagtcggcagaaccaatgcgttccagcgcagcccgggcgcgctccggtttaccggccttcatgagccagcgcggcgactcggggacaaaaaacatcaggaccagaaacgccagcgccggcaccagttccgcaccgaacatccagcgccagcccatctgcccattccagctgtccacaatcatctgctgcgtcgcccccggctccaccggttcagcaatcatcagattgattaactgagcggccagcacgccaatcacgatggtgagctgattgaccgcgacaaaacgccctcttttctctgccggactgacttcggcaatgtaaagcgggctgagagcggaagccagaccaatccctacgccgcccacaatgcggtaaaccacaaacatatcgaaatgactggcgaccgccgtcccccaggccgacgcgctgaacagcacggcggaaagaattaatggcagcttgcgccccagtttgtctgcgcaccatcccgaaattaatgcgccgaaaatacagcccaacagcgctgagctcatcgcccagccggactgcgccgggtccgtaattgaaaaccaggcttcataaaatggcttagcgccgccaatcaccacccagtcatagccaaacagtaaaccaccgcaggcggcgaccagacaaatcgtccagacgtagcccattttcagatgtgtctgcgcgttgttcataatgattcctctataagggaaacgcagggaacagtagggttcaggcgggccgagcccgcccattgaggttcaggaaaaaatgccgctttgcagggcatggcgaatcagatgcgccttatcatgagccggatttatttgcagaagctgctgcatcctctgctggcaggcggatacgttgcccagccccagatggcccagcgcttcaataaacaagcagtgctgcagatgtctctgctgcgctgatacatcgagaaccaccaggtccggaagagagacggcaaaaaaatcgacttgcggaacgtcatcccgatgctgcgcggcccagtcgataaaatggcggaagtgctgctcggcctgcgctgggttaccgctcttacgcagcgcaatgccctgccagaaaaggtaatcggcgggttgatcgttgtagtaccgcccggcgtccagcgttgagcccccttgccgggcaagctggtaatattccgccgcctgctgcgcatccccagcctgttctgcgcagtagcccagcaaataccagatatcgttgtccgtttgcccaggcagtcgcccctcccccagattgtcgggatagcgtaatgcggctttcagacagtccgtggcctgtttaaacgccccacgctcgatgaactgtaatgcccgatggagctgattgagcaaatactggccggtgattttcccttctcctccttcccagggatggaatacgcgcgtatccagaatcgcggcggcatcggcataatgaccggacgcgttccataggcttagcagttcagcggtcaggtcgtcccgcttcagcaccacggctttacgttccaccagcgtcgtcagtcgctcatgtaccggcctggccagtaatttttgcaaaaaatcgagttcaaacaggaagcgcgcattgtccggctccagcgctacggcgcgctgcagataagccagcgcctgcgttgcatcctgctgtttattccaggagtaaacgcccagcagacgatgagcgggcgcataatcgggagatttttcgagcgtctcgcgccagcagctcaccgcctcgtcatagcgacgtttgctgtaccagaagcaaccgagtagatagcgggcaaaagcgctgtcgcccagcgactgcagcatctgaacttcatcgagcgagttagggaaacgaacattgtgcgcatggcagtgctcggcggcggcaataaactgttggcgttcattggcatcatcacttagcgacgcacgccagagcatcggcagcgcttcctgactgtccagaaccgcaagaacctctttcaccgccgacgtctgtccgatagagagcagccaacccgccagcaggctggcgttgacccctctgcgccccgtgatgcgcagcagggtttctcgcgcgtcgtcgctccgctcaatcatccagcgcgcgcagtgcagcggatagctcaatgggtattgctcaagagaggcgaaaataaactctagcgctgctttcttctgcccactgttggctaatgccagcgctttcaaccccatcgccagaggattgctggcgttgaaccgcagactggtgtttactttttccagcgcatcggcaacatcaccgcgcttcatcgccagccgcgccagcgaccaccaggcggcgtcacggcagttaccgctccaggaggctttgtaatagtgatcccaggcgcctgcatcatcccccatcctttccagcacgctggcaagcagcatactggcttcgccatctcgcgggttcttattcaaacgatgcgcgcgctgtagcgcagcacgggcacactgttccgccagcgcccagtcggcactgttgaacgccagggtaccgagggcaacattattgcgataatcctgcggatcgagctcaaccgcccgacgatagtaatccccggcgtagcggcttgcgtggttgtattgttcaaggtgctggccgataaaatagagctcgtcgccattgtggatcgcttccggtaacgcgggcgctatagctggttcgggcagcggcgtctgttgggtaatatgttcctgataatccagcagcggctggttctcggcggttttcactttgagggttaagcgcccgacgccattttccggcagcgtctgctgccagctctcaccgggcttcagcgtcagctgagtttcgtacaatggctgatggtcagcgctgagttcaaccacgatatgatttagcggagcaatggcatatacgccaagctgcagttgcccagactcgcgaaccagcttcagtgccagctgtgtattggcattttgcaccatccctaactcgctgtagggaaggaaattttgcacaaacaccttctcttcataaggcgcaagccacgtaaagtcaggctggttatcggtgaagacgccggtcatcagctcaatataagggccattttcatcagtcagatttcgatcccaggcctggccaaaatccccgtacccccagctccactgtttcttgccaggagagacatggtgatcggcaacatgcagtaacccgcctcgctcgtcatgatgataagcgccgacaaaatcgtaatccgacttctccgccatatacgaagtgggtaccgggacgtttttataacgggagatatcaacccccgcagaatagtccactttgtagtaggtaccggtggcaatcgggaaagcggaaacatcacgcttaccatggtcgaatacagcggtgacatcgggtgggaatacactctggtgggcatcgccgccttttactgcagggttggcccaccacaggaaatggcgcggcgtggcgttaccattgaagatcttgccagtgatttcaatcagcgcgcggtcaggatagagcgtaaacccggccataacctgcaaaccgcgcatgggctccgcttcccccatccatacggtctgcgcgccgttttctccctgctgaatagaaaaatcgaccggtttaaaggtcgtcggccggtgatgttgcggccagttaaattcgattccgccggagatccagggcccgagcagccctaccagggctggcttaaccacctcattgtaatagacgaaatcacgttgtttgactttgtcatatgcccggtgaatacggccgccaagctccggtagcagcatgacccgaaggaaatcattctccatccacactgcctgataatcgcgcatttcgcgttcgccggtcagggtatcaattacgccgtagggatagacgctgccggaagatccttgataaacacgtttttccagaaacatagggttcggatcttccgcgcccgttgtccacgttggtaatgaaatgatttcctgccagaccttaaccgaaccgtacatgatgcctccactaaacaaaacgaagtaaaagttgcaataacaggagtctatatcgccaattcgctgttaaaatgcgcaatgctcacgcaatatagttaagggagttaagtgtatgcagcgtactggctttaataacgcccgggtccggcaggccaataagtcgatttttctttcccatctgtggcgggaaaagcagctcagtaaatcacagctctctcaactcaccggtctctccattccggcggtgagcaatattctggccgagctgcttagcgagggattgatcggtcactcaacggaacacttgagcaaacggggcgtgaacagcggcagctaccagatccccgagcacggcgcctggacactgtgcatgaatatcaccccgaccagcattgaatatcagcttgccgacgcccgcctgctggcagtggatggccatcagcatttgccggtcaacgcgcccactcctcaggccctgcttgaggccatcgttgaatgctggcggcatatccaccgccgctacccgcagcacagcatcaatctcgcccttggcgtgcatggacaggttgatccgattaccggcgtttcacaaaccatgccccaggcacgctggaaaacaccgatcgaaataaagtatctgcttgaggagcggcttggcgtgcaggttcgggtagataacgactgcgtgatgctggcgctggcggagaagtggcagcatcagggtacacagcaggatttttgcgtgatcaacgtcgactacggtatcggctcgtcatttgtgattaacgatcatatttatcgcggcagtctgtacggcagcgggcagattgggcatacgattgtcaatcctgacggcaaagcctgcgactgcggaagatacggttgcctcgaaaccgtcgcctctctcagcgcgctgaaaaaacaggcccgaatgtggctcaaaacgcagcctgaagcaacgctcgcccccgagcagttaaccacggcgtcgctcattgaggcctggaaagagggagatgtgcaaattcgcgcatgggttgataacgctgccaacgcgattggcttaagcctctataatttcctgaatatattaaatattaatcaaatctggctttacgggcgcagctgcgccttcggtgagcagtggctggaaagtatcgtcaaacaaacgggttttaacccctttgaccacagggatacgccgcgagcgcacgccacccaaataggctttggccagctgacgcgcgcccagcagctgatggggataggttatctgtacgttgaggagcaattgcagacgctggtttagtcataaacgaacgtggcggagcgcaaatttgtgtattacgtttaaatcacatgtctctcataacgagctgattatgaactcactccgctattttgattttggcgcttcccgctctctgttgctgcttatcgcccgcatcgccgtggtgattctgtttattctttttggctaccccaaactgctgggctttgacggtacggtgcagtacatggccgcctccggcgcgccgatgccgaccctggcggcgattatcgccgtcattatggaagtgcctgccgcgattctgattgtgctcggctttttcacccgcccgctggcggtcatctttattttctacaccctgggcacggcggtgattggccatcactactgggatatgactggcgatgcggtattgccgaacatgattaacttctggaaaaacgtcagcatcgccggcgctttcctgctgctggcaataaccggccccggggcgatctccctcgaccgccgctaatctccagacgcaaaaaaggccgcatacgcggcctttttgatgtcaacgctaacgcttacgcatataccgggaagcgggcgcagatatccagcactttacctttcacgcgctcaatgaccgcgtcgtcattgatattgtccagcacgtcacacatccagccagccagctctttgacttccgcttctttaaagccgcggcgagtcacagccggagaaccgatacggataccggaggtcacgaacgggctcttcggatcgttcggcacgctgtttttgttgacggtgatgttggcgcggcccagagcggcgtcagcttctttaccggtcaggtttttatccaccagatccagcaggaacaggtggttctcagtaccgccagacaccactttgtagccgcggttcaggaacacttccaccatcgctttagcgtttttcgcaacctgctgctggtaaactttaaactctggctccatcgcttctttcagcgccaccgctttcgccgcgataacgtgcatcagcgggccgccctgcgcgcttgggaacacggcagagttcagttttttgtacagctcttcgctaccgcctttcgccagaatcaggccgccgcgcggacccgccagggttttgtgggtggtggtggtcacaacgtgagcatgcggaaccgggttcgggtacacgccagcggcaatcaggcctgccacgtgcgccatatcgacgaacaggtaagcgccgatgctgtcagcgatttcacgcattttcgcccagtcaacgataccggagtaagcggagaaaccaccgatgatcatcttcggtttgtgttcctgagcctgcttcgccatgtcgtcatagtcaattttaccggactcatcaataccgtaagggatgatgttgtacagtttgccggagaagttaaccggggagccgtgagtcaggtggccgccctgcgccaggttcataccgagcacggtgtcgcccggctgcagcagcgcggtgtagacggcaaagttagcctgggagccggagtgcggctggacgttagcatagtcagcgccgaacagttctttcgcgcggtcgattgccagctgttcaaccacgtcgacgtattcacagccgccgtagtaacgcttgcccggatacccttcagcatatttgttggtcagctgagagccctgcgcctgcataacgcgcggactggtgtagttttcggaggcgatcagttcgatgtgctcttcctgacgtactttttcctgctccatagcctgccacagttcggcatcataatcggcaatgttcatttcacgctttaacatccgcatctcctgactcagctaacaataaaatttcggcctaaaaaggcggtccgattggacaacggcccacagtataaccgaatcattctgtgataacaggtcttgacaaaggattttacgcaaacgattggctccgcatgacacaaggctttgagcaataacgcctctctcagtatcaacggatttcttttcaggtttgtgatgcaaactcttcatgttgtaactggatcgggggaatgtgttaaagaaccatttacaacgcagggttatttctttaagatgcatttaaaatgcatcattaagataacacataaggaagcacgctatgcttgacgctcaaaccatcgccacggtgaaagccaccattcccctgctggtagagaccggcccgaaattaaccgcccatttctacgatcgtatgttcgcgcataatccggagctcaaagagatcttcaacatgagcaaccagcgcaacggcgatcagcgtgaagcgttattcaacgctattgccgcctacgccagcaatatcgataacctgcctgccctgctgccggcggtggaaaagatcgcccagaaacacaccagcttccagatcaaaccggagcagtacaatattgttggcagccatctgctggcgaccctcgatgaaatgttcagtccgggccaggaagtgctcgatgcctggggtaaagcctacggcgtgctggcgaacgtctttatcggccgtgaagccgagatctatcagcaaaacgccagtaaaaccggcggctgggaagggacccgcgcgtttcgcatcgtgaagaaaaccccgcgcagccagcttatcaccagctttgagctcgaaccggttgatggccagccggtcgccgattaccagcctggccagtacctggccatctggctgaaaccggaaggcttcgaatatcaggaaatccgccagtattccctgacccgcaaagcggacggcaaaggctaccgcattgcggttaaacgcgaggaaggcggtcaggtttccagctggctgcataaccatgccagcgaaggcgatgtggtctatctggccgccccggcgggagatttcttccttaacgttaagccacagacgccggtcaccctgctctctggcggcgtcgggcaaacgccgatgctggcgatgctggatgcgctggcgaagagcggtcatcagggtcaggtgaactggttccatgcggcggaaaatggcgacgttcacgcctttgccgatgaagtgaaggcgctcggcgcggcgctgccggcgtttacctctcacgtctggtatcgcaccccgactgaggccgaccgtcaggctggacgttttgatagcgaaggtttgatggatttagcagcagtggcggacaatattcgcgacccgcagatgcagtattatctctgcggcccggtagcgtttatgcagtttgcagcgaagcagctggtcgaattaggggtcaacaaagacaacattcattacgaatgcttcggcccgcataaggtgctgtaagccccgacgcgcggggatttgtaggccgggtaagcgcagcgccacccggcaatactgcagcgagcggcgagcgttaaatcgccgcgtcgtcttcttcgccggtacgaatacgaatgacccgcgccacgtcgaagacaaagattttaccgtcgccgattttaccggtctgtgcggtacggatgatggtatccacacaggtatcgacgatatcgtcggtcaccacaatttcaatttttactttcggcagaaaatcgaccatatactcggcaccacggtacagttcggtgtgccctttctggcggccaaagcctttcacttccgttaccgtcatcccggtgatgccgacttcggccagcgcttcacgcacgtcatccagtttgaaaggtttaataatcgcatcaatctttttcatggggttcctgtcttaatcgcgtaaccggttgcttaccgtatcataacttgcgctatagtgcggagctactctttaaagtcgttggcgtcgagctcatggcgcgacagcagcttatagaattcggtgcggttgcgccctgccatccgcgcggcgtgagtgacgttgcccttggtaatttgcagcagcttgcgcaggtagttcagctcaaactgattgcgcgcctccacgaaggtcggcagcgccgtgttctcgccctccagcgcttgctcaaccagcgcgtcgccgatcactggcgacgaagtcagggccacgcactgctcgatcacgttcaccagctggcgcacgttgcccggccatttggcggccatcagccgcttcattgcatcgctggaaaatgcccgcacgaacggcttatggcgatcggcggactgacgcagcagatggttggccaacagcggaatatcttccgtgcgttcggagagcggcggtattttcaggttcactacgttgaggcggtagaacaggtcttcacgaaactcgccgcgggccatcgccttcggcaggtcgcggtgggtggcggagataatccgcacgttgatttcgatatcgcggttgctgcccagcgggcgcaccttgcgctcctgcaggacgcgcagcagcttcacctgcaacgcaaccggcatatcaccgatctcgtcgagaaacagcgtaccaccctcagcggcctggaataatccttcacggttactgaccgcgccggtaaaagcgccccgcgcatggccaaacagttcggattcgagcagctgttccggcagcgcgccgcagttgatcgccacgaacggcttatcatgacgcgggctggcgttgtggatcgcctgggcgacgatctccttcccggtcccgctctggccattaatcagtacgctgacatccgattgcgccaccattccggcctgctcaagcaggcgcagcatcagcgggctgcgggttacaatcgcctggcgccaggcttcgtcggtggccggcgagcgctgctccagcgcctcatcaatggctttatataaggcatctttatcgaccggcttggtcaggaagctgaacaccccctgctgggtagccgccacggcgtcgggaatcgaaccgtgagcagtgagaatgatcaccggcatgccggggtggcccttctggatctcgctaaacagctgcaggccgtccatttcatccatccgcagatcgctaatcaccagatccactttctcacgccccagcacgcgcagcgcttccggcccgctctcggcggtgaccacgctgtagccttcgctgaccaggcgcatgcccagtagcttcaacagtcccggatcgtcatccaccagcagtaaacgcgccggtttacggatcgtcatggatcacctccggcactttttcgctgccgaaattgccgcccggcttgcggctggagagctggcgttcgatatccgtcaggttctccagcttgcgggtggtcagctccagctgctcgcgcagcgccagctcctgctgacgcagtgtctccagttcgctatcgctggactgctgaagcttagcgtaacgggcacgctcttccaccagctgcagctgacgggtctggccgtcgcgccagagctgatacagcgggcggacctgaacggcgatttgcgggctgaaggtatcgagacgcgccaccaggtcgcggcgctcctcaggggtaattttagcatcagcaagcaggatgccgcgacggaacgcgtcctgccagctgtcgtcggtatggcgtttcgcctccgcccgcgcctgcgccggcgcgaggcgatcggcacagtcaatgccccgcagccagtagaggggatttttgtcgctggcatcgctgctgtgcgcccagatatccgcgcagtctaccgcgacaaaatcggccacctgatgctgcgcctgcccgggggcggcggtaccttccgcggtatgcggtgaaaagccggcggaacaccccgccagcgtcagacaagcaatgcctgaaagcagccatccgctgagggaacggcgccaggccaggaattgggacatagttccccgatatcgattcataagttggattattccggcgctgagggaagcgtaatgcgaaaacagacctgcccggcgggcgcatcaactaagctgagctccccttgcatctgccggacgcagtcgcgggcgatactcaaccccagtccactgcccttaacggcccctttacgctggtgactcccctggtaaaaaggctcgaatatcatgtttttttccgcggccgggatcggttcgccgctgttggcgacatcaatacgcacctgctctccgtgccggtagctatggatacggatgttaccggattcagcgccatagtgcaccgcattggagtagagattatccattacgcttatcaatagcgcaggctctgccaggcaacgccgcgcctgcagcgtcagttcggtatgcatcagtttagcccgcgcgggcaggctgtgcgccgccacgacgttttccaccaagtccaccaggtccaccgcttcgcgagccaccgggccgtcggcctgttttcggttatagtccagcagctgttcaatcagcttttgcaggttacggctactgctgtcgaggatctcgacaatctcctgctgctcaggggtcaggggccccgcgacccggtcggccaacagctcggtaccttcacgcatactggccaacggggttttcagctcatgcgacagatggcgaagaaattgatgccgctgcgactccagccacgccaggcgctcgctgagccagatgatgcgcttgcccaccgatcgcagctcgcgcgggccggtaaacaatgcggcgtcgtccagcgacttccctgcccccagctgattgatcattctttcgatgcctttcaccgggccgataatcatgcgggtgaagagtagcaccagcgccaggctcagcagaaacagcaccagcgcctgccagccaaaaaactggccgcgttcggctatctcctgctgcagctgttggccacgagaatagacgaccgcccgggtcgcctgcaccatatcgctgttattactggcgaaaacttccagtctggcggctgcctgggcatcggggccgctatttttacactgcagctgcgccagatcgctgacatcctgacgcagcgcctgccagagcttctcgtccggcagcacgccggcgtgggcgtccagcatctggctgtagcgctgccgctggttttgatagacgcgcgccagcgtcggatcgtccagcacgcagtactggcgatagctgcgctccatctccagtgcggcattgatcatcgcctcgctgcgtcgggcgtcgaccagggtggtacggttaatatgcgccgcctgggcgctgagggcgttcaggctctgccaggcctgccaggccagcaccagcaatggcagcaggatcagcacaaaggagagcgtcaccagctgacgcagcgaacgggggaaaagagagagtcgcttcaaggatgttgtctcaatcattagctctggtcgatgctaactgaggagcgcgccggagaaaagcgctaccgctgagtgctgcgccgcagaaacaacaaagccaggcgcaaggcctggctttgttcaggaatgaggcggtgccttactcgacgtttcgcccgatgtctgataaagccaggctgttatcaggagttggacggcaggcacctgtttgtgcgtcattcgaagtttatgtagcgcgtcccgaaggggctgacataagaaggtgaatgagccactggttaatattatgcatgaactatgccagctctcaaaacattttattaacatattgatatatatggctttaaccgcaggaacagtcgtactaccactgtttatttttcacccgcattgtcgctatttagcgacaccaaataggctaccgattactcatcatttaaatcaataacttaagtgtcgcctattgacgacactacaatatcgcagttgtcggcaattcccgacaccctggcgtgccgaccatcacagataaaaaaagccccctgtcaggcagggggctgatacgttcgcgtgaagcgcggcgggaagattaacccagctgtttacgcgcgttacggaagatacgcatccacgggctatcctcgccccagttctccgggtgccaggagttgcttacggtgcggaagacgcgttccgggtgcggcatcatgatggtcgcgcgcccgctttcgctggtcaccgcggtgataccgttcggggaaccgttcgggttcgccggataggtttcggtcactttgccgaagttatccacgaagcgcagcgccaccagacctttgctctccagctgggccagatgcgcgctgtcgcgcacttccacctgaccttcgccgtgggagaccgcaatcggcatccgtgagccaaccatgccttccagcagcagggatgggctttgcgtcacttccaccaggctaaagcgcgcttcaaagcggtcagactggttgcgcacaaagcgcggccacaggtcgctgcccgggatcagctcgcgcaggttggacatcatctgacagccgttgcacacgccgagcgccagcgtctgcggacgatggaagaaggtcgcgaactcatcgcgcacgcgctcgttgaacagaatcgacttcgcccagccctcgcccgcgcccagcacgtcgccgtaggagaagccgccgcaggctaccagggcatggaaatcgcccagaccggtccggccggccagcaggtcgctcatatgcacgtcgatggcgtcaaagccggcacgatggaaggcggccgccatttcaacgtgggagttcaccccctgctcgcgcaggacggccactttcggccgcgcgccggtggcaatgtacggggcggcgacgtcgtcgttaatatcaaacgagagcttcacattgaggcccgggtcggcatcattggctttcgcctcatgctcctgatcggcgcaggccgggttgtcgcgcagacgctgcatctgccaggtggtttccgcccaccacatgcgcagcgtggtgcggctttcgctgaacaccgtctgaccgccggcggtcagcacgaagcgatcgccctcaaccgctttaccgaggtaatgcacgcagtccgccaggccgttaaccgccagaatggcttccaccgcctcacggtctgcggcgcggacctgaatcaccgcccccagctcttcgttgaacagcgcggccagatggtcgtcgcccagcgcggcgatatccgcttccacgccgcagtggccggtaaaggccatttccgccagcgtgacaagcagaccgccgtcggagcggtcgtggtaggccagcagtttacgctgcgccaccagggcctgcatcgcattccagaagcctttcagttgcgcgacatcgcgcacgtcagccggcttgtcgccgagctggcgatagacctgcgccagcgccgtcgcgcccagcgcgttgtgccctttaccgaggtcgatcagcagcagggcgttatcttccgtcgaaagctgcggcgtgacggtatgacggacatcttcgacacgggcgaaggcagagatgaccagcgacagcggagaggtcatctcgcgctgctcgctgccttcctgccagcgggttttcatcgacatcgagtctttaccgaccggaatggtcaggcccagcgccgggcacagctcttcgcccaccgctttcaccgcctcatacaggccagcgtcttcacccgggtggccggcggcggccatccagttagccgacagcttcacgcggttcagctcgccaatctgcgtggcggcgatgttggtcagcgcttcgccgaccgccagacggccagaggccgcgaagtccagcagggcgaccggggcgcgctcgcccatcgccatcgcttcgccatagtagctgtcgaggctggcggtggtcaccgcgcagttggccaccgggatctgccacgggccaaccatctggtcgcgggcgaccataccggtcacggtgcggtcgccgatggtgacgaggaaggttttctcggccaccgtcggcagatgcagaacgcggttaaccgcatcggcaagggtaatcggttggcgatccagcgcactaccctgagctttcagagtctgcacgtcgcgggtcattttcggcgttttgccgagcaggacgtccagcggcaggtcgatcggctgatcgttaaagtggctgtcgctcaggctcagatgctgctcagcggtggcttcgccgataacggcataaggcgcgcgctcgcggcggcacagttcgtcgaacagcggcagctgctccggggcgaccgccagaacataacgttcctgcgattcgttacaccagatctccagcggactcatccctggctcatcgctgagaatatcgcgcagctggaatttaccgccgcggccgccgtcgctcaccagctccggcatagcgttggagagaccgccggcgccaacgtcgtggataaagaggatcgggttggcgtcgcccaactgccagcagcggtcgatcacttcctgacagcggcgctccatttccgggttgtcacgctgtacggaggcgaaatcgagatcggcatcggactggccggaggccatagaagacgccgcgccgccgccgaggccgatgttcatcgccgggccgcccagcacgatcagcttcgcgccgacggtaatctcgcccttctgcacgtgctcaccgcggatgttgccgataccaccggccagcatgatcggtttgtggtagccacgcagctcttcgccattgtggctggtgactttctcttcataggtgcggaagtagccgttcagcgccggacgaccaaattcgttgttaaacgccgcgccgcccagcgggccttcggtcatgatgtccagggcggtgacaatacgatccggtttaccgaaatcttcttcccacggctgttcgaagcccgggatacgcaggttggaaaccgagaagcccaccaggcccgctttcggcttcgcgccgcggccggtggcgccttcatcgcggatttcgccgccggagccggttgccgcgcctggccatggagagatggccgtcgggtggttatgggtttccaccttcatcagaatgtgcgccggctcctgatggaagtcgtagcgtccggtctgatggtcggcgaaatagcgcccgacttcagacccttccatcaccgcggcattatctttataggccgacagcacgtagtccggcgttttttcaaaggtgtttttgatcattttgaacagcgacttcggctgctgttcgccgtcgatgatccagtcggcgttgaaaatcttgtggcgacagtgctctgagttcgcctgggcgaacatatacagctcgatatcgttcgggttgcgtcccaggcgggtaaacgcgtcctgcaggtagtcaatttcgtcgtcggccagcgccagacccagacggaggttggcgtcaatcagcgcctgacgcccttcgcccagcaggtcgacgctggtgaccggcgtcggctgatggtgagcgaacagcttctcgcccgcttccagctcgtcgaagacgctctccatcatgcggtcatgcagctccgccgccaccgcggcccactgcgcttcggtcagggttgaggcttcaacgtaatacgccacgccgcgctccagacgcacaacctgcgccagaccgcagttgtgagcgatatcggtagctttagaagaccagggagagatggtgccagggcgaggggtcacgagcagtaatttaccggtcggggtatggctgcttaagctcgggccatactgaagcagtcgcgccaggcgctcgcgatcgtcagcgctcagcggggcattcagatcggcaaaatgaatatattcggcatatatggcgcttaccggaaggttggccgcctgaaatcgtgccagcagtttattaatacggaatgccgacagtgcaggtgaaccacgcaaaatttccatcataagtctctcgtcttcgaagctttcagggtgagccagggggggaaacgggcgtcattatagtgaatcctgcgccccgacgaaaccgtttgcgtagaaataaaatcattgatgctgtttatcaataaatgtgacgaccatcgcgaataagttgccaactggcgcattattaagcagaatgccgcacattcgacgacaaccttgcgttttttccggacatcgcctgctgaggaacctgaagctgcagaagattaactctctgaaaaaattaaagattaattatctgctgatcggcattgtcacccttttgctggcggcggccctgtggccgtcgatcccctggtctggtaaacccgagaaccgcgtggcgggcattatcgctcgcggcgagctgcgaatcagcaccatcaactcgccaatgaccttcgccaccatgaacaataaagcgttcggtctggattatgaactggcgaagcagtttgccgactaccttggcgtaacgcttaagataactgtccggcaaaacatcagtcagctgtttgacgacctcgacgacggtcaggccgatatgctggccgccggactggtctataaccaggagcgagtgaaaaactatcaggccggccccacctactattctgtttcgcaacagctggtctaccgcgtcggcaatacccggccgcgcaccctcgcggcgctgaccgccgagcagctcactatcgctccgggccacgtggcgatcaacgacctgcagaccttaaaagccgagaaatacccggatcttgcctggcgcgtggacgaaaaacgcggtaccacggcgctgatgcaggcggtgattgacggtaaacttgattacaccatcgccgactcggtggccgtcagcctatttcagcgcgtccatccggagctggcggtggccctcgatatcaccgacgaacagccggtcacctggtttagcgcccgggacgacgataattcgctgtcggcggcaatgcttgatttcttcaacaacatcaatgaagacggcaccctggcgcgcctcgaggagaagtacctcggccacggcaacgatttcgattatgtcgatacccgcaccttcctgcgcgcggtggaaaatattcttccggaggtgcagccgctgtttgaaaaatacgcccgcgagattgactggcgcctgctggccgccatcgcctggcaggaatcccactgggatccgcaggccacctcccccaccggcgtgcgcggtatgatgatgctcacacgcaatacggcgcaaagcctgggtctaaccgaccgcaccgatgcggcgcagagtatcgacggcggcatgcgctacctgcaggatatgatggataaagtgccggattcgatcccgaaagatgaacgcatctggtttgcgctggccgcttataatatgggttacgcccatatgctggacgccatggcgctcacccgcaaacagaaaggcaatcctaacagctgggcggacgttaagctgcgtttaccgttgctgagccagaaaccctattacagcaaactaaaatacggctatgcccgcggccatgaggcctacgcctatgtggaaaacatccgcaaatatcagataagccttgtcggctatttgtcagagaaggagcgccagcagcagcaaacgctggccctggcggaggattacccggccgtgctccccaatgagctcgaacagccgcaggagaccaccctgccctttttcaagtttcgcgccgataagcagatggataatgcccggatgaaactccccggccacctgtattaactttccccggtctgctcccgggctttcttcagcgcttttttctcttcccgccgccagcgaaagaagtcgctcagcatggcagagcaggactctgccagcacgccttcgcttatcgcaacccgatggttcattcccgggtggtgcagaacatccatcagcgagccggcggcgccggtcttggcatccctggcgccaaacaccaggcgggcgatacggctgtgcaccatcgcgcccgcgcacatgacgcagggctcgagggtcacgtacagcgtggcgtcgatcaggcggtagttttgcagcaccagtccgccctggcgtaaggccataatctccgcatgggcggtggggtcgtgacggcctatcggccggttccagccctcgccaatgacctgattgttatgcaccagcaccgcgcccaccggcacctcgccctcttcccaggcgcgtttcgccagcgtcagggcatgacgcatccagtattcatcattgagttcgaggtcagacacagcggccactccagcagaaaaagcggggcgcattatacatgggcgctatcaattacacactattactccagctgctgaagctctccctgaggggttacccgccagcgatgctggcaaaagccgagcaatggattatcctgctcactatcgctatagccgctatacagccgcagcggggcgccaatctttttctccagctgtaccaccttttcatgccccaggcagcgcagggtcaatacccagccgccccagcggcgcgcggtgcggctggctatcagattcacccgcggcaaccagagggtatcgcgatagacctgctccaccagcgactgcggcgagccggtgatcaaccagacgtcggcatcggtgctggtcaggtaggcggtaagccgcgcatgaactaccggaaacgccgtcacatgatggcgaaaccagccgacaaactccgcttccagccgcttcagcaccgcctcgcggcggccaaaggttgtcgcccacagcaggaggctcatcggccagcgcgccgcccgtccgctcactgccagcccggcaaggatcaccggccccatcgccaccaccagcaacaggttcagcggcaaatggcgcagcagatagcgcagaaaactgccgaacatatcctgttggtgtaaggttccgtccagatcgaaaaacaccactctccgttcagtgtgctgcaaactgcctcctttatctcagaactcgcttctcgttagggtaagcttaacagcctgacgccatgtcgagggaaaacatcccctgccgttaagaaagaattaaagtagcaggcgaaggaaaaattgtggcttaagaatttttaattcatggtataccccttataatcgaataaaaattctgtcagtcacgagccggacggctccagcggagctccaatgaactgtttaacgcgtattcgtcagcgctatcccaccctggcggcgagcgacaaaaagttggccgattatattctaagccagcccgatgagacccggcacctcagctcgcagcagctggcggcggaagccggtgtgagtcagtccagcgtggttaaatttgcccagaagctgggattcaaaggctttccggcgctgaagctggcccttagtgaagcgctggcgagtagcccggatccgcactccgtcccggtgcataaccacattcgcggtgacgatccgctgcgtctggtcggcgagaaactcattaaagacaatgtcgccgccatgcatgcctcgctggacgtcaacactgaagagacgctacgggaagccgtcacgctgctgcgcaacgcccggcgagtgatcgtcaccgggattggcgcctccggcctggtggcgcgtaactttagctggaagctgatgaagatcggcatcaacgctgtttctgagcaggatatgcatgccctgctggcgacggtgcaggccatgtccagcgacgatcttctgctggcgatctcttactccggcgagcgccgggagatcaatatggcggccggtgaagcgctgcgcgtcggctgtaagatcctggcgatcaccgggtttagcccgaacgccctgcaacagcaggcgacccactgcctgtatactatcgccgaagagcaggcgacgcgcagcgcggccatctcctccaccagcgcgcaaatgatgctcaccgatctgctgtttatggggctggtgcagcaggatctggagcgggcgccggagcgcattcgccatagcgaagcgctggtgaaaaagctggtctgagcagaaaatgggcgtataatgcccgccctgtttgtgttgtttctgagactttcctgatggcgctgttaattaccaaaaaatgcatcaactgcgatatgtgcgagccggagtgcccgaatgaggccatttcgatgggtgagagcatttatgagattaacagcgaccgctgcaccgagtgcgtgggtcattacgacacgccaacctgccagaaagtgtgcccgatcccgaatacgatcctgaaagatccggcacacgtcgagagtgaagaacagctgtgggataaattcgtgctgatgcaccacgcggataaaatttaaccgccctcctggctagctttcgacaatcaccgtggcgcaggcgtagtggcgttcatcagcgagagtaacgtgaatagcgcttactcccatgcgttcagctaaaaggtttgcttcaccccatagccgcagcttcggcttgcccagctcgtcgttgtaaacctcgaactggttaaacgccagcccgttacggatcccggttcccagcgctttcgccgccgcttccttgaccgcaaagcgtttcgccaggaaacgcaccggctgctggtgctgctcccagatgctccattcatggtcgctcagcacccggcgggcaaggcgatcgccgctgcgggcgatcaccgcttcgatgcgggcgatctcgacgatgtcggtacccaacccgagaatggccattagccgcgcgcttccagcatcagacgcttcatttccgccaccgcctctttcaggccgctcatcaccgcacggccaataatcgcgtgaccgatattcagctcatgcatttccggcagcgcagcaatcgctttcacgttgtggtaggtcagaccgtggccggcattcaccttcagcccgaggctggcggcgtaggtggccgctttggcaatacgttccagctccctggcctgctcggcgtcggttttggcatcggcatagcagccggtgtggatttcgatatagggcgcgccaacgtctgccgccgctttgatctgcgcttcatccgcatcgataaacagggagaccaggatgccggcatccgccaggcgttgacaggcatcgcgcatcttgtcgcgctggccggcgacgtccagcccgccttcggtggtcacttcctgacgcttctccggcaccaggcagcagaagtgcggtttggtttcgcaggcgatcgtcagcatctcttcggtgaccgccatttcaagattcatgcgggtgtgcagcgtctggcgcaggatacgcacatcgcgatcggtaatatggcgacggtcttcgcgcagatgcacggtaatgccgtcggcgccggcctgttcggcaatgaaagccgcctgaaccggatccgggtaagcggtgccgcgagcgttacgcaaggtcgcgatatggtcaatattgacccctaacaataattcagccatgacaatcctcgttaatcattattcgtattatcggctcgcgcctttcgcgcgggcataaactggcgaaacaactcccggctcttgagcggtttgccgccgagatagggcttcagggcgatacgggtaaagcgcttcgcggcgcgcagcgtatcaacatcaggaaactcgcgactcgccaatgctttcaaatggtgcccggtaaacgtgttgttatcaatcaccaggctggcaataaagcctttttcttcacgatagcggtaggtcatggtgtcgtctaccggctcgccgctcccggcgcagtggagaaaatccacgccataccccaggtgcccgagcagcgccagctcaaaacgccgcagcgcgggctccggcgagccgctggccccggcgagcgcctgaatgcagtgcaggtagtcgaaaaagagttcggagaagcgtgtttcgtgctccagcacgcgggagataagctcgttaacgtagagaccgctgtagagggtgatgccgctgagcggcagcgccagcgaaacggcttccgcgctgcgcagggttttgacttcgccgcgcccgccgaagcgaaccaacaagggggtaaagggctgtaaagcgcctttgagattagagcgtttggagcgtgcgcccttggcaaccaggcgcacgcgaccggattcttccgtgaagacgtccagcatcaggctggtttcgctccacggacggctatgcaggacaaaggcgcgctgccatccatccacgttgcgttaactcagaggtcgtcaacgtaaccgagactgcgcagggcgcgctcgtcatcggcccagccggatttcactttcacccacagctcgaggtgcaccggcgcttcaaacatctcctgcatgtccttacgcgcttcgataccgatggttttaattttggcgcctttgttgccaatcaccatctttttctgcccttcgcgctcgacgaggatcaggccgttgatatcgtaaccgccgcgctcgttgctgacgaaacgttcgatttccacggtgacggagtacggcagctcagcgccgaggaaacgcatcagtttttcacggatgatttcggaggccataaagcgttgtgagcgatcggtaatataatcttccgggaagtgatggatcgcttccggcagatgcttacgcacgatcgccgcgatggtatcaacgttggtgccggtttccgctgagatcggtacgatatcgaggaaattcatctggctggcgaggaactgcaggtgcggtaacagatccgctttttcctgcacgttatccaccttgttgaccgcgaggatcaccggcgctttcgcgtcgcgcagcttgttgagcaccatctcgtcgtcctgcgtccagcgggtgccttccaccacgaagatgaccagttccacgtcgccaatcgaactgctggccgctttgttcattaagcggttaatggcacgcttctcttccatatgcaggcccggagtatcaacgtaaatcgcctgatacggcccttcggtatggataccgacgatgcggtgacgggtggtctgcgctttacgggaggtgatcgagatcttctgcccaagcagcttgttcaacagcgtggatttgccaacgtttggacgacccacgatggcgacaaacccacaataatttttttcttcgctcattccagctccagctttttcagcgcctgttcggcggcagcctgctccgccttacgacggctggaacctgtgccaaccaccggttcactcaggccactgacctggcagtggatagtaaattcctgatcgtgcgcttcgccgcgaacctggaccaccaggtaagacggcagcggcagatgacgtccctgcagatactcctgcagacgcgtcttcggatccttttgcttatcgcccggactgatttcgtccagacgggtctggtaccaggagaggattaagcgttcaacgttctgaatatcactgtcgaggaaaaccccgccaattaacgcttcaacggtatccgcgagaatcgattcgcgacggaaaccgccgcttttcagctctcccggcccgaggcgcagacactcgcccagctcaaactcgcgggcgatctccgccagcgtgttgccgcgcaccagcgtcgcgcgcatacggctcatatcgccttcatctacacgaggaaagcgatgatacagcgcattcgcgatcacgaaacttaaaatggagtcacctaaaaattccaggcgctcattatgtttgctgctggcactgcggtgagttaatgcctgttgcaacagctcctgatgatgaaaagtgtagcccagctttcgttgaagccgattaattacgatggggttcatgcgttaccaataaatgaatgcgtcaaagatgcagcacacgaaaccgacctgagcattcgcttcaaacagtaatttgaaacagaccaatacgctttcgtgtgcagtgtcacccggcagagcgacaaccaaaaacttcggggggatattctatacgcaacgacacgggatgtcgttagtttgaatggatttaaatactaaataattcacgccgctgcgataacagcagcgacgtgaattcagcagaggaaattaatgaattccaccaatgcgcgataaccgcacgccggtcggccattcaccttcctgcttttcaaaactcatccagatagcggttgcttttccgaccaggttggcttccggcacaaagccccagtaccggctgtcggcgctgttatcccggttgtcgcccatcatgaagtactgaccgggcggcacaatccaggtggccagcggcagaccggactgatggtagtacatcccaacctgatcctgggcaatcggcaccatcagaattcggtgcgtcacgtcgcccaatgtctcctgacgctcggtaagacgaatgccgtcggctttggtttcgcccttcggcaactgccagaaaccgctgctcgcttcgccgccgttgctgcgggagaaggtctgaacaaaatcgctcggctccacgttggaataggtcaccggcagcgcgttgccgcaggcctgtccggaactgcagcccggctgaatagtgacctgtttggcaaccggatcgtaggtgaccttatcacccggtaaccccaccgcgcgcttaatgtaatccagacgcgggtcttccggatatttaaacaccacgatgtcgccgcgcttcggatggccggtctcgatcagcgttttctgatagataggatctttaatgccgtaggcaaatttctccaccagaataaaatcgccgatgagcagcgttggcatcatcgaacctgaagggatctggaaaggctcataaataaatgaacgtaccaccagaacgatcgccagcaccgggaaaaccgatgcgccggtttccagccagcccggtttcgggccgactttcttcagcgtcttcttgtccagttgctcgccggtcgctgcctgagcagcggcctgacgttcacgacgtttcggtgcaaaaatgaacttgtccaggcaccataaaacgcccgtcaccagggttgcaatcaccaggatcagggcaaacatgttcgccatgccaactccttagggttatttgccgtctttaccaacgtgcagaatggcgaggaacgcttcctgcggcagctcaacgttaccgacctgcttcatacgcttcttaccttctttctgcttctgcagcagctttttcttacggctgacgtcgccgccgtagcatttcgccaggacgtttttacgcagctgtttcaccgtagagcgcgcgataatgtggttaccgatggccgcctgaatcgcgatatcgaactgctgacgcggaatcagatctttcatcttttccaccagctcgcggccgcgatacggcgcgttatcgttgtgggtgatcagcgccagcgcatcgacgcgctcaccgttgatcagcacatcgacgcgtaccatgttcgacgcctggaagcgtttgaagttgtagtccagcgacgcatagccgcgggaggtggacttcaggcggtcgaagaagtcgagaaccacttccgccatcggaatttcataggtcagcgccacctgtttaccgtggtaaaccatgttggtctgcaccccacgcttctcgacacacaaggtaatcacgttgccgaggaactcctgcggcagcagcatgtgacactcggcgatcggctcgcgcagctcctgaatattattcagcggcggcagcttggacgggctgtcgacgtagataacttctttggaggtggtctctacttcgtagactaccgtcggcgcggtggtgatcaggtcgagatcgtattcacgctccagacgctcctgaatgatctccatgtgcagcaggccgaggaagccgcagcggaagccgaagcccagcgcggtagagctttccggctcgtagaacagagaggcatcgttaaggctcagtttgcccagcgcgtcgcggaaagcttcataatcatcggagctcaccgggaacaggccggcatacacctgcggtttcaccttcttaaagccaggcagcgctttgtctgccgggttgcgggcggcggtcagggtatcgcccaccggcgcgccgaggatgtctttgatcgcgcagaccagccagcctacctcgccgcatttcagctcggtacggtcaacctgtttcggggtgaagatgcccagacgatcagcgttatagacctggccggtgctcatgaccttgatcttgtcgcccttgcgcatggtgccgtttttaatccgcaccagcgacaccacgccgaggtagttatcgaaccaggagtcgataatcagcgcctgcagcggcgcgtccggatcgccttccggcggcgggatatcgcgcaccagacgctccagcacgtcggtcacgccgacgccggttttcgctgagcagcgcaccgcgtcgtgggcgtcgatcccgacgatatcttcaatctcgtccgctacgcgctcagggtcggccgcaggcaggtcgatcttgttgagtaccggaaccacttcgagatccatctccatggcggtgtagcagttggccagggtctgggcttctaccccctgcccggcgtctaccaccagcagcgcgccttcgcacgcggcaagagaacgggaaacttcataagagaagtccacgtggcccggggtgtcgataaagttcagctggtaggtctcaccgtcgctggccttatagtccagggtgacgctctgcgccttgatggtgatcccgcgttcgcgctcaagatccatggagtccagaacctgggcttccatttcacgatcagaaaggccaccgcaaatctggatgatacggtcagacagcgtcgacttaccgtggtcgatgtgagcgatgatcgaaaagttacgtatattcttcatatttagagttaattatgccttacgagtatcatgaggccgctgtactgtgcctgacgttttttaatccgaaaacgccgcattctacactacatccgcgaaaccaggaaatgctgttagatccagcatacccgcagaaattgtggcgttgtaacaggaaaggtaaataaagataagggccagtgaaatcactggcccatgtcggaggaaggcgtatcaacacgcagcagatccggcggcagtgcgacgttcaaaatcaccggctgccaggactgacgtgccgccagtcgcggcgacagaccgcgcgccaccaggaagccgccgacgccgcccagcagcgcgccgcaaagtgacgcaatatcgctggcaaacagcacctgaaaaatagacgccattacaaacagccccgccagcggcgccatatacaccagcatcgctgagcccagcaggctgctttcagcgatccccagctccactttttgccccgcggccaacggctgctcgcagggcacgctaatggtatggctggtctgcggccccagcttgtttagcacccggctaccacagccggcacgggaggcgcagctgctgcaggaggctttaacgtcgcagtgcacctgcgccacgccgttatgccaggaaaccacggtagcccactctttaatcattgtactgccttgaatttaatactgtcagagatacgcttcgccgtctgcggcggcagctcgcccactacggttatctccgcgttatcgcgcaccgtcgtgctgacggtgcgtcggccggtgcgcaacagctggtcgctgctggccgccgtggcgcggttgatattgatcgagaagctgaacaagccgtcggaatagagacgtgattctaccggaccgtcaaaggtgggaagacggcgctggctgctggaaacctcagtcacgccctgcgggagccacgtcggcgcccagttgaagttggctttgtcgcctccttcaggcaccgacagctgcggcggcaaattcgcttttgccagcgtctccatgctggcgctgacgttatcgccaacattgaaggagacgacccggaactgctccagcgtttccccgtcgcggtcgagcaaatcgacgcgtagcggcagcttggtttcagcatccagccaggcgataaagctgtagcgcgtgccgtcgcgagccacgacgcggatcacgtcgcagaggcggtcagcgatacgggtacggcccacggagataaaatcatacgccgcggagaggcgtttgaaatcgctatataccagcgatggcagcgaatcgacgatatagtccccgttcagggtgaacggatcgagaccgggttcaaaatagctgatttccgtgccgcgcaggaccacttcccggcgcggaccgtccagctgcagcaactgcgccagcggttggttgttcagtcgcgcgtgacgatagcgcagcgactcaacgccttgtttgctgatgctaacaaaagacagctcataattgagagactggctggccaggttcatctgctgcaacaacgccccggacgatgtatcagccgaggcgttgacagagaacaacaggctgcctgccatgagcgacatggcacaccaaagttgcttcattactgcgattgcgttcctaaagtttgatagcccggtacctggactgcggcctgctgagtctgggcctggccaaactgaagctgctcagcgtgcaggcggcgctgcagttcgtagtcctgcagcatggcgttaattcggcggcgctgttcctggacctgcgcctgctggccgcttcccgctgacgcgtcagccggcacgccaagacttaccgggcttgctttacccatcatgggcagcgtattgaacaccggcgcttcgggctgctgagcggaatcagactgaccattatagtgctggacgccgacgataaccgcaagcgatacgcaggcggcaacgcccatttgagtcagggagctggcccacggacgcaccttgttccagaacggcatctgccgccactgatgcggtgcgggctgagattcaggaataagcggcgccgtctgacgaacgggctcattttcaatggcggccatcacccgggcggagatatcaaattgcagcacctcagcggtatcgccacgcagcgtatcgcggataaggtgataactctcccaggttttttgcatctcagaagaacgactcagctcgttgagcagttcgttatccagcgtttcaccatccattaaagccgaaagtttttctttctgcatgcctgatacccttttccagtattccgctatcgtcaacgcctgataagcggttgaactttattatcaatagcttctcgcgcccggaagatacgcgaacgcaccgtcccaaccggacaatccatgatagcggctatctcttcatagctcaggccatccagctcccgtaacgtaattgccatgcgtaaatcttccgggagcgattcaatggtacgaaaaactatttgtctcagttcttctgacaacattaagttctcagggttcgaaatttctttcaacgccccgccgctttcgaagttttccgcctcgttggcgtcaacatcgctggacggcggacggcgcccctgagcaaccagataattcttcgccgtgttgacagcgatacggtataaccaggtgtaaaaagcgctatctccccggaaagagtccagcgcacgccatgccttaacgaacgattcctgaacaacgtcagcgatatcgcccggcggtacatagcgggaaaccaggctcgcgaccttatgctgatagcgcactaccagcaaattaaacgctttctgatctcctttctggacccgttcaacaaggacctgatccgttaactgctcgctcatccgaggtaatgtctccccaaacccaattcccatgcgtcttcaaaacaccacccaaaatctgcattatgagcaagctgactgttggagtgcatgaaaacaataaagttccgttacgctttttgttttttgtctggcaacggcggcagatcgttatcaatcattatatgcccaggttgctaaacgataggtaagtcaataagaaaaagcgcaggcccgtctgaagggtatcgtaacacgccgtttatttcactataaaatccaatgccatcaacctgccccgcgtctcattttcagcgcgcaagacgccgtttccgttcgccttttgtttagccgtcacaacagcagacaaaaaaattgtacgattcctcacggaccggtgctattgtgagctaaatgtgtttagtaaattaaacaaagacaatgaataccactcctgacttctcttgtgatgtgttgattatcggcagcggcgctgccggtctttcccttgccctgcgcctggctgagcacagttcggtgaccgtgctgagtaaagggccgatcagcgaaggttcgacgttctacgcccagggtgggattgccgccgtcttcgatgagacggacagtattgaatcccatgtcgaagataccctcatcgccggcgcgggactctgcgatcgtcatgcggtcactttcgtcgccagcaatgcccgatcatgcgtccagtggcttatcgatcagggagtgctgtttgacacccaggtccaggccaatggcgaagagagctatcatctcacgcgcgaaggggggcacagccatcggcgcattcttcacgccgccgacgccaccggcaaagcggtagagacgacgctggtcgataaagcgcttgcccatcctaatatccgcatccttgagcgcagcaatgccgtcgatttgatcgtatcggataagattggcctgccgggcacccgccgggtggtcggggcatggatctggaatcgtaataaagagcgggtggaaacctgcagcgcgaaagccgtagtactcgctaccggcggggccgcgaaggtttatcaatataccactaaccccgacgtttcttccggagacgggattgcaatggcctggcgggcgggatgtcgggtggcgaatctggagtttaaccagttccaccccaccgcgctatatcacccccaggcgcgtaatttcctgcttactgaagcgctgcgcggcgaaggcgcccaccttaaacgcccggatggcacccgctttatgccggactttgacgagcgcggcgagctggccccgcgcgatatcgtcgcccgcgccatcgaccatgaaatgaagcgcctgggcgtggactgcatgttccttgatatcagccataaacccgaggcgtttgttcgccagcatttcccgatgatttatgaaaagctgctcggcctgggaattgatttaaccaaagagccggtgccggtcgtccccgccgcgcattacacctgcggcggcgtgatggtggatgataatggccgcaccgacgtcgatggtttatacgccatcggcgaagtcagctacaccgggctgcacggcgcgaatcgtatggcgtcgaactcgttgctggagtgcctggtctatggctggtccgccgcggaggatattacccggcgcctgccgctcgcccagaaggtcgccacgctgccagcatgggatgaaagtcaggtggagatcccggatgaactggtggttatccagcacaactggcacgaactgcgcctgctgatgtgggattacgtggggattgtgcgcaccacccgcaggctggagcgcgccctgcggcgcattaccatgctccagcaggagctggatgagtattacgcccgcttccgcgtctcgaataatttgctggaactgcgcaatctggtgcaggtggcggagcttatcgtacgctgcgcgatgttgcgtaaggagagccgcggtctgcattataccctcgactatccgcagccgctgcctgacagcggcccgtcgatactctcgcccctggctcacataaagagataaaagtcctcggtcagagcggtaaagccttccgaatattgctgctctggcccgcggatcgccagcctgtcgctgaaacactcccctgccgtcggggagaaagccagcagcacccgatgcggcggtcgcagctcggtctccgccacgtcagtacgcagtcgcagatgccagcccatcgcccttgcccgttcgatgaaagcattaccaatatccaccggcaacaccacgcaaaaaaaaccttcttcggtaatatgctctgcggcacaggtcagcagggaggcgtgatcgagcgtagtggtgtaccgcgcctgctctcgctgcgaggtcgcgcatggcacgccttcggcaaaaaagggcggattactgattatcagttcatagcgtcgagtttgcgactgctgccactgatgaatatcggcctgccagacctcaatccgcgaagcccacggcgacgcgagggcgttttcccgcgcctgagcggcggcctcttcgtccagttctaccgcctcgacatgcacatcatctccggtacgctgcgcgagcatcagcgccagcaagccgctgcccgcgccaatatccagcacatgcttcactccggcaatcggcgcccaggcgcccagcaaaataccgtcggtacccaccttcatggcgcagcgatcgtgagcgacaaagaaccgtttgaaggtaaaaccattgcgcggcagcgcaaacttcgactgagacatcctcaataaccttgccgacaaaaactcctgaacctaaggctatgcacaataccggagaacagatagccttacaaacagatgaacattacgtcagtaacgtctataatcggcggcccactcagaggtagaacatgactgtaacgactttttccgaacttgaactcgacgaaaacctgctggaagccctccaggataaaggtttcactcgcccgacagccattcaggccgccgctattccgcctgcgctcgatggccgtgacattctcggttcagcgccgaccggcaccggtaaaacggcggcgtatctgctgccagcgttgcagcacctgctcgatttcccgcgtaagaaatccggcccgccgcgcattcttatcctgacgccgacccgtgagctggcgatgcaggtagccgaccacgcccgcgagctggcgaagcatacccatctggacatcgctaccattaccggcggcgtggcgtacatgaaccacgcggaagtgttcagcgaaaaccaggacatcgtagtcgccaccaccggtcgcctgctgcaatatattaaagaagagaatttcgactgccgcgccgtcgagaccctaatcctcgatgaagccgaccgcatgctggatatgggttttgcccaggatatcgaaaccatcgccggtgaaactcgctggcgcaagcagactatgctgttctccgcgacgctggaaggcgatgcgatcaaagactttgctgagcgtctgctggaggagccggttgaagtttccgccaatccgtcaacccgcgagcgtaagaaaatccatcagtggtactaccgcgccgacgatatcgaacataaaaccaaactgctggtgaatctgctgcaacagccggaagccacccgcgctatcgtgtttgtgcgtaagcgtgagcgcgtgcatgagctggctaactggctgcgtgaggccgggattaacacctgctggctggaaggcgagatggtgcaggccaagcgaaacgaagctatcaagcgcctgaccgacggccgcgtcaacgtgctgatcgccaccgacgtcgctgcccgcggtatcgatattccggacgtcagccacgtctttaacttcgatatgccgcgtaccgcggatacctacctgcaccgtatcggtcgtaccggccgcgccggtaaaaaagggaccgccatttctctggtcgaggctcatgaccacctgctgctgggtaagattggtcgctatattgaagagccgttgaaagccagagttatcgatgaactgcgcccgaagacccgtgcgccgagcgagaagctgacgggtaagccatcgaagaaagtgctggcgaagcgtgcgcagaagaaaaaagatgaaaaagagaaaccgcgggtgaagaagcgccaccgcgatacgaaaaatatcggtaagcgccggaagccaagcgcggccgggacgccatcagcgtccagcgatgagtaaaaaaacgccgggatatcccggcgttttcacatctggcgttagccttacaggctttcggtaaaggtacgggcgataacgtcgcgctgctgttccggcgtcagagagttgaagcgtaccgcgtagccggaaacacgaatggtcagctgcggatatttttccggatgctcaaccgcgtccagcagggtttcgcgacgcagcacgttaacgttcaggtgctgaccgccttcgacgcgcacttccggtttcacgtccaccgggatttcacggtattcgatttcacccagtttgcttaccgcaaccacatcatcttccgcaaaaccacctttggcgcacaggcagcgcgcttcgcctttttcgctatccagcagccagaaagagttgagcaggtcgtcgtttgccgctttagtaatttggataccagtaatcatttgatgcctcccaggcagtgtttattcgattttggcctcttcgcggccaattggtaaaaccattgttgtatgagtgtatatatatcagccgcaccctcggcattccttgatataaatcaataaaaaccactcacccaacgtgggtataggaggtttttattgttttacatcaagttacgccattgtgagctataaataattttgtaaattttcaattttttttgcataaaagccggcatcaagccgtgccgattttgttctatagaaagaagccgttaagctatagcgatgacccttttgcaggagagcaagatgaccacccctttaacctggcatgacgtgctggcggatgaaaagcaacaaccctattttctcaatactctgaagaccgtcgccgaagagcgccagtccgggatcaccatctatccaccgcaaaaagacgtcttcaatgcgtttcgctttactgaactgggcgatgtcaaagtcgtcattctcggccaggacccctatcacggcccgggtcaggcccacggtctggcgttctcagttcgtccgggcgtcgcgatcccgccttcgttgctgaatatgtataaagagctggaggccacgatccccggctttacccgccccacccacggttatctcgaaagctgggcacgacagggcgtgctgctgctgaatacggtcctgaccgtccgcgccggacaggcgcactcgcatgccagtctgggctgggagacctttaccgataaggttatcgctttaatcaatgagcattgcgagggagtagtttttctgctgtggggctctcatgcgcagaagaaaggcgcgattatcgatcgtcagcgccactgcgtgctgaaggcgccgcatccatcaccgctctctgcgcatcgcggcttctttggctgcaatcatttcgtacagaccaaccagtggctggttgaccgcggcgaaacgccgatcgactggatgccggtccttcccgctgaaagcgagtgattgacagccataaaaaaaagccagcatcagctggcttttttgcattcaggcaggcgaatcacgccttgttctgacgccaccattccgccagcaggacgccggtcgccacagagacgttcaggctttcgacattaccggtaccgtcgatggcaacgctgagatcggcgctggaaatcgccgcatcggacagaccatcacgttcctggcctaacgccagcaccattttcttcggcagctcggctttaaacagcggggtaccattatggctggacgttgagacaatcgcgtagcccgctttgcggaactgatcgagggtatcgataaagctgtcgccagtgatcggttcaacatgctccgcaccgccctccgccgtacggatcgccgccccggactccagcacgccagcatcctgaaccaccacgcccttcacgccaaagtgcgcgcagctgcgcatgatcgccccgagattatgtgggttacccacatcttccagcgccagaacgcaatcttcttccccggccttcgcgacccattgagcaacagaagtgccgtggcgttttttgatcaggaagcagacgccgccgtggtgctcggtgccggaggctttcgccagctcggcttcgtccaccacgtgataggccttacggttggccgccatccagcgcagcgcctctttaaagcgcggcgtcacgctctgaataaaccaggcgcgaacgatagcttccggacggctctggaacagcgcctggcaggcgttttcgccatatacgcgggtctcttccgcacgctgacgacgcagcacttccggatcgataaagctcttcccgctgatcccgccgtgatcttcttttaccggcgtctcatcgccaggagcgcgggaaacggtacgccacggagacgcatcgtcgcgatgaaaatcatcgcgtttgcgatcgtcacgcttacggtcgtcacgtttgcgatcgtcaccgcggctgtttcgttcgtcacgcgcagggcggctgcggccgtcaacacgagattttcctggacgacctccccctttcccggtacgtgggttatgggtgcgtttgtcagaatcatcatcactgcggacatacatcactttgaccttgccgcttttatttttcagttcgtcgctcatcaattttctccacctgcgctgcgcgaagcgcgcagattacccgatgtgtcatcgcttcgccatgatttcgtttaaaagccggcctctattgcactcatcgaacaaaacgcattgtcctcaaataacacttcatcgataatatgtaacatcacagaaacatatcggccacgtgccacgttgcaacccataaccagaggttagttatgaataccgtttgtgccagttgtcaggctctgaaccgcctcccggacgatcgtagcgcggatggcgcaaagtgcggacgctgcggtcacgatctttttgacggcgacgtcatcaacgcgaccggggcaacgctggataaactcttgaaggacgatctgccggtcgttgtcgatttctgggcgccatggtgcggaccctgccgtagcttcgcgccgatctttgaagacgtcgcggaagagcgtagcgggaagatgcgttttgtgaaagtcaacaccgaagcggaacgtgagcttagcgcccggtttcgtatccgcagcatcccgaccattatgatgttcaaaaatggcgaagtgatcgacatgctcaatggcgcagtgccaaaagcgccattcgatagctggcttaacgaagccggccaacaataacccttccggggcaccgcttgtgccccgttttcacctctgcgacaatagcgtttttcactagcgactcccatgactgataacgctgtccttcgcctgcgcgccgaacgtctcgcgcgagctacccgccctttccttgcgcgcggcaatcgcatccgccgctgccagcgctgtctgctgccgctcaagcagtgcctgtgcgccacgttaacctcggcgcaggccgccagccgcttctgcctggtgatgtttgatacggaaccgatgaagcccagcaacactggccggctcatcgccgatattctgccagataccgaagcgtttcagtggtcgcgtaccgaaccgccgcaggcgctgctcgatctggtcgcccatcctgattatcagcccatggtcgtatttccggcctcctatgccgggccggatcgccaggtcctgagcgcgccgccgtccggtaaaccgccgctgtttatcatgctcgacggcacctggaccgaagcgcgcaaaatgttccgtaagagtccttatctcgacgcgctgccgattatctccgtcgatctgtcgcgcatctctgcctaccatctgcgcgaggcgcacgccgacggacaatattgtaccgcggaagtggccatcgccctgctggatctggcgggcgatgccccggccgccgctgcgcttggcgagcacttcacccgcttccggacccgctatctggcgggaaaaacccagcataagggcagtatcacagcgggccaggtggaaaacgtttaaaatcattcggtcactgggatgaaaggagaccggtatgagccaacgaggcctggaagcgctgctgcgaccaaagtccatcgccgttattggcgcatcaatgaagccgcagcgcgctggctatctcatgatgcgcaacctgttagccggcggcttcaatggcccggtgatgccggtcacccccgcctggaaggcggttcttggggtactggcatggcctaccatcgagagcctgccgtttacgccggatctggcggtgctctgtactaacgccaggcgtaatctcgaattgctcgaagccttagggcaaaaaggctgcaagacctgcatcatcctctcttcgcagccggaacagtacccggcgctgctcgaatgcgccgcgcgctatcagatgcgtctgctcggccccaacagtctcggactgctggccccatggcaagggctgaacgccagcttttcaccggtgccgatccatcgcggtaaactggcctttatctcgcagtcggccgccgtctccaatactatccttgactgggcgcaacagcgcgagatgggtttttcctacttcatcgccctgggtgatagcctggatattgatgtcgatgacctgctggactttctggcccgcgacagcaagaccagcgccattttgctgtacctcgagcatctcagcgacgcgcgccgctttgtctccgccgcgcgcagcgcttcgcgaaacaaacctatcctggtgattaaaagcggccgtagtccggcggcgcagaagctattgcacgccaattccgggatggacccggcatgggatgcggccattcagcgcgctggtctgctgcgggtgcaggatacccatgagctgttctctgcggtggaaacgctcagccacatgcgcccgctgcgcggtgaaaaactgatgatcgtcagcaacggtgcggcgccggcggcgctggcgctggatgagctttggttgcgaaacggtaagctggcgactctcagcgaggagacgcgcgacgccctgcgccaggcgttgccggttggcgtggagatcgccaacccgctggatctacgcgatgacgccagtagcgaacactatcagcgggcggtgaatgttttgctcaacagtcaggactatgacgcgctgctggtgatccactctcccagcgccgccgcgccgggcaccgagagtgccctggccctgattgacgctctgaagcatcacccgcgcggtaaatatgtcaccgtgctgaccaactggtgcggcgaattttcctcgcaggaagcgcgacgtttattcagcgatgccggcctccctacctaccgtacgccggagggcacgatcaccgcttttatgcatatggtggaataccgtcgcaaccagaaacaactgcgcgagacgccggtgctaccagactccttaaccgccaataccagcgaggcgcatgctctgctgcagcaagcgatagaagacggcgccaccacgctggatactcacgaggtcagcccggtgcttcgggcctatggcatccacacgctgccaacctggattgccgctgacagcgcggaagcggtgcatatcgctgagcagataggctatccggttgcgctgaagctgcgttctccggatatcccgcacaaatcagaagtacagggggtcatgctctatttgcgtaccgccgccgaggtgcagcaggctgcagatgcgatgatcgatcgcgtcaaactggcctggccccaggcgcgcattcatggattgctggtgcaaagcatggccaatcgcgctggcgcccaggagctaagagtagtggttgagcacgatcccgtcttcggcccgttgattatgctaggcgagggcggcgtggagtggcgggccgaggaccaggccgccgtggcgctgccgccgctgaatatgaacctggcgcgttatctggtgatccaggcgatcaaaaataagaagatccgcggccgcagcgccttgcgcccgctggatatcgctggcttaagccagctgctggttcaggtctcgaacctgatcgtcgactgcccggagatccagcgcctggatattcatcccctgctcgcctccggcaacgagtttacggcgctggacgttaccctggggcttgctcccttcagcggcgacagtgaaagccgtctcgctattcgtccctatccgcaccaactggaggagtgggtggtgatgaaaaatggcgatcgctgtctgttccggccgatcctcccggaagatgagccacagttgctcgcatttatcgcccaggtcaccaaagaagatctctattatcgctattttagtgagatcaacgaatttacccatgacgacttagccaatatgacccagatcgactacgatcgagaaatggcgttcgttgccgtcaggaccagcgcagagaagagcgagatcctcggcgtgacgcgggcgatctccgatcccgataatattgacgccgagtttgccgttctggtccgttcagatttaaaagggttaggcctggggcgaaggttgctggaaaagctgatcgcctatacgcaaagccatggcctgcagcgccttaatggtattacgatgccaaataaccgaggcatgataggcctcgccagaaagctgggattcaccgtcgatattcagctggaagatgggattgtcagcctgtcgctgcccctgaatcagggataatcgcgcgacgctgaccgcaattgttgaccacattagcgggtagtaatggtattattgcccgcttacgtcgtctgcatggtacagaagacccttcaataaacagagaagaaacgcactgtgatgttgtcaaaatttaagcgtaataaacatcaacaacaccttgcccaactccctaagctttctcagtcagttgatgatgtagagttcttttacgcccctgcggaattcagggaagcgttactgacccggattgcccacgccactcagcgtatatgcattattgcgctctatctggagcaagatgatggcggaaaaggaattttgcaggccctttatgacgccaaacgccagcgtccggaactggatgtccgcgttctggtggactggcaccgcgctcagcgtggccgtatcggcgccgccgcctctaataccaatgccgactggtattgtcggatggccaatgaaaatccaggggtagatatccccgtttacggcgtgccgattaacacccgggaggcgctcggcgttctccatttcaaaggctttattattgatgactgcgtcctctacagcggcgccagcctgaatgatgtttatctgcatcagcatgataagtatcgctatgatcgctatcagtgcatccgtaacggcaaaatggcggacatcatgttcgactgggtcgacaacaatctggttcaggggcgcggcgttaaccgtctcgacagaccggatcggccaaaaagcccggaaatcaaaaacgacattcgccagtaccgtcaggagctccgcgaccgcagctaccattttgtcggcaccgctggtgacgaagaactctccgtcaccccgctggtaggcctgggtaaatcgagcctgctgaataaaaccatctttcacctgatgccctgtgccgaacacaagctgacgatctgcaccccctacttcaacctccctgccgtactggtaagaaatatcatccagctgctgcgcgacggtaaacaggtggagattattgtcggcgataaaacggctaacgatttctacattcctgaagatcagccgtttaaaatcatcggcgcccttccctatctgtatgagatcaacctgcggcgtttcctcagccggctgcagtattatgtcaataccgatcagctgatcgtccgcctgtggaaggatgacgataacagctaccacctgaaaggcatgtgggttgacgatgagtggatgctgctcactggcaacaacctgaacccgcgcgcctggcggctcgatctggaaaacgccattctgatccacgatccaaagcggcagctgggggccatgcgggagaaagagctgaagctcatccgcacccacaccacggtagtgaaacattatcgggatctgcaaagtatcgccgactatccggtgaaagtgcgaaaactgatccgccgcctgcggcggatccgcattgaccggctgatcagccgtattctctgactatcagccccgcctcgacggggcttttttctggaagcgctatgcgtacgataatagtgattgcttcgctgctgttaaccggctgcagccacatggcaaatgatgcatggtccggtcaggacaaagcccagcattttctggcctcagcgatgctctctgccgctggcaatgaatatgcgcaacatcagggttacagccgggaccgcagcgccgctatcggcctgatgttttccgtcagccttggcgcctcaaaagagctttgggacagccgcccggctgggagcggctggagctggaaggattttgcctgggatgtcgccggcgcgaccaccggctacgctgtatggcagttggctcatcagtaagcgttacagacgcaaccccttccctttgcgatgcaacatcagggagacaaggaaggcaatggcggccatcaccgtcacataccagtagaacgcgtgctctatccctgccgacttaagcgacagcgcgacgtactccgcagagccgccgaacaatgcgttcgcgacggcataggacaacccgaccccaagcgcgcgaacctgagccgggaacatctctgctttcaggatgccgctgatcgaggtatagaaactgacaatcagtaaggcgcagatcaccaggccgaaggcggcatagggtgagctcactttttgcaaggcgctgagaataggcacggtaaataacgtcgccagcacgccaaagcacagcatggaggtccggcggccaactttatccgagaaggcgccgaatagcggctgaaccagcatataaacgaacagcgccgcggtcatgatcacgctggcggtgctggccgtcatgcccgccgtgttgaccagatacttttgcatataggtggtgaaggtgtagaaggtcagcgatccggcggcggtaaagcctaacaccatcgcaaaggcccggcgattgcgccacaaccctttaaatgagccagcctctttcagcgcccgggtctcttgcttcgaggtttcgtccagctggcgacgcagccacagcgcgacgatagccagtaccgccccgagggcaaaaggaatacgccatccccaggcatggagatcttcatcgctaagcacctgctggagcgccacaaccactaatacagccagcagttgaccaccaatcagcgtaacgtactggaaggaggcatagaagcctttcttaccctccaccgcgacttcactcatataggtcgcactggtgccgtattctccgccaacagacagcccctggaacagacgcgccagcagcagcagcgccggggcccaggtgccgatcaccgcataacccggcagacaagcaatcaccagtgagccaaagcacatcatgcagaccgagataagcatggacgttttacgtccccggcggtcagcgatccgaccaaacagccatccaccgataggacgcatcagaaatccggcggcaaatacgcctgccgtttgcagcagttgggtggtggtatttccggatggaaagaagatgtgcgcgaaatagagcgagcagaatgagtaaacgtaaaaatcaaaccattcaaccagattccccgaggaagcgccaacaattgcccaaatacgacgacgggtatcggccagttccggcgcgccccgttcggtaatgctactttctgtcattgttatattgctccagcaaagactgcaatctgtcttgtcgggcgtaccacgtcacgcagacaaattaattagtaaactaaatgttatataattgttatatttttatatgtgattggattcacattttttttcgcaagcacggttttcgcgatcatcgccagcgcaggggcagggaaaaagtggattatggcgaagggattgccatgacggggttttattttgcgttgaaaggagatataggagggattttcccggaggcggtgctgcgcaccttgtccggccacagggacgtagccccgtgtcggatccgtagccccggtaagcgcagcgccaccggggaggcatgccggcacgctggccggacgacagaaacgcaaaaagcccatccggcaggatgggctcttcacttgtttgatgcctggcagtttatggcgggcgtcctgcccgccaccctccgggccgttgctgcgcaacgttcaaatccgctcccggcggatttgtcctactctggagagcgctcaccgacaaacaacagataaaacaaaaagcccggtctttcgaccgggctttctgctttatttgatgcctggcagttccctactctcacatggggagaccccacactaccatcggcgctacggcgtttcacttctgagttcggcatggggtcaggtgggaccaccgcgctagtgccgccaggcaaattctgttttatcaacacgtttcaccaacgtatcgattaatctgtatcagagctgaaaattctctcaatccgccaaaacatcttcggcgttgtaaggttaagcctcacggttcattagtaccggttagctcaacgcatcgctgcgcttacacacccggcctatcaacgtcatcgtctttaacgttccttcaggagacttaaagtctcagggagaactcatctcggggcaagtttcgtgcttagatgctttcagcacttatctcttccgcatttagctaccgggcagtgccattggcatgacaacccgaacaccagtgatgcgtccactccggtcctctcgtactaggagcagcccccctcaattctccagcgcccacggcagatagggaccgaactgtctcacgacgttctaaacccagctcgcgtaccactttaaatggcgaacagccatacccttgggacctacttcagccccaggatgtgatgagccgacatcgaggtgccaaacaccgccgtcgatatgaactcttgggcggtatcagcctgttatccccggagtaccttttatccgttgagcgatggcccttccattcagaaccaccggatcactatgacctgctttcgcacctgctcgcgccgtcacgctcgcagtcaagctagcttatgccattgcactaacctcctgatgtccgaccaggattagctaaccttcgtgctcctccgttacgctttgggaggagaccgccccagtcaaactacccaccagacactgtccgcaaccccggtcaggggccaacgttagaacatcaaacattaaagggtggtatttcaaggttggctccacgcagactggcgtccacgcttcaaagcctcccacctatcctacacatcaaggctcaatgttcagtgtcaagctatagtaaaggttcacggggtctttccgtcttgccgcgggtacactgcatcttcacagcgagttcaatttcactgagtctcgggtggagacagcctggccatcattacgccattcgtgcaggtcggaacttacccgacaaggaatttcgctaccttaggaccgttatagttacggccgccgtttaccggggcttcgatcaagagcttctccttacggataaccccatcaattaaccttccggcaccgggcaggcgtcacaccgtatacgtccactttcgtgtttgcacagtgctgtgtttttaataaacagttgcagccagctggtatcttcgactggtctcagctccatccgcagggacttcacctacacaccagcgtgccttctcccgaagttacggcaccattttgcctagttccttcacccgagttctctcaagcgccttggtattctctacctgaccacctgtgtcggtttggggtacgatttgatgttacctgatgcttagaggcttttcctggaagcagggcatttgttacttcagcaccgtagtgcttcgtcatcacatctcagccttgattatccggatttgcctggataaccagcctacatgcttaaaccgggacaaccgtcgcccggctaacatagccttctccgtccccccttcgcagtaacaccaagtacaggaatattaacctgtttcccatcgactacgcctttcggcctcgccttaggggtcgactcaccctgccccgattaacgttggacaggaacccttggtcttccggcgagcgggcttttcacccgctttatcgttacttatgtcagcattcgcacttctgatacctccagcatgcctcacagcacaccttcgcaggcttacagaacgctcccctacccaacaacacatagtgtcgctgccgcagcttcggtgcatggtttagccccgttacatcttccgcgcaggccgactcgaccagtgagctattacgctttctttaaatgatggctgcttctaagccaacatcctggctgtctgtgccttcccacatcgtttcccacttaaccatgactttgggaccttagctggcggtctgggttgtttccctcttcacgacggacgttagcacccgccgtgtgtctcccgtgataacattcttcggtattcgtagtttgcatcgggttggtaagtcgggatgaccccctagccgaaacagtgctctacccccgaagatgagttcacgaggcgctacctaaatagctttcggggagaaccagctatctcccggtttgattggcctttcacccccagccacaagtcatccgctaatttttcaacattagtcggttcggtcctccagttagtgttacccaaccttcaacctgcccatggctagatcaccgggtttcgggtctataccctgcaacttaacgcccagttaagactcggtttccctgcggctcccctatacggttaaccttgctacagaatataagtcgctgacccattatacaaaaggtacgcagtcacacccgaaggtgctcccactgcttgtacgtacacggtttcaggttctttttcactcccctcgccggggttcttttcgcctttccctcacggtactggttcactatcggtcagtcaggagtatttagccttggaggatggtccccccatattcagacaggataccacgtgtcccgccctactcttcgagttcacaacctgtgcattttggtgtacgggactatcaccctgtaccgtcggactttccagaccgttccactaacacacaagctgattcagactctgggctgctccccgttcgctcgccgctactgggggaatctcggttgatttcttttcctcggggtacttagatgtttcagttcccccggttcgcctcgttaacctatgtattcagttaacgatagtgtgacgaatcacactgggtttccccattcggacatcgccggttataacggttcatatcaccttaccgacgcttttcgcagattagcacgtccttcatcgcctctgactgccagggcatccaccgtgtacgcttagtcgcttaacctcacaacccgaagatgtttcacttctgattgcgaaaatttgagagactcgaacacacattaactgtgtgtcgtttcaattttcagcttgatccagatttttaaagagcaaatatctcaaacgtcacccgaagatgagttttgagatagttcggcacgcgtctttcactcacgaaccagcaagtggcgtcccctaggggattcgaacccctgttaccgccgtgaaagggcggtgtcctgggcctctagacgaaggggacactgaagtctcaatcgcaagacgccttgcttctttacgttcatcagacaatctgtgtgagcactacaaaggcaggttctttaaggtaaggaggtgatccaaccgcaggttcccctacggttaccttgttacgacttcaccccagtcatgaatcacaaagtggtaagcgccctcccgaaggttaagctacctacttcttttgcaacccactcccatggtgtgacgggcggtgtgtacaaggcccgggaacgtattcaccgtagcattctgatctacgattactagcgattccgacttcatggagtcgagttgcagactccaatccggactacgacatactttatgaggtccgcttgctctcgcgaggtcgcttctctttgtatatgccattgtagcacgtgtgtagccctggtcgtaagggccatgatgacttgacgtcatccccaccttcctccagtttatcactggcagtctcctttgagttcccggcctaaccgctggcaacaaaggataagggttgcgctcgttgcgggacttaacccaacatttcacaacacgagctgacgacagccatgcagcacctgtctcacagttcccgaaggcaccaatccatctctggaaagttctgtggatgtcaagaccaggtaaggttcttcgcgttgcatcgaattaaaccacatgctccaccgcttgtgcgggcccccgtcaattcatttgagttttaaccttgcggccgtactccccaggcggtcgatttaacgcgttagctccggaagccacgcctcaagggcacaacctccaaatcgacatcgtttacggcgtggactaccagggtatctaatcctgtttgctccccacgctttcgcacctgagcgtcagtctttgtccagggggccgccttcgccaccggtattcctccagatctctacgcatttcaccgctacacctggaattctacccccctctacaagactctagcctgccagtttcgaatgcagttcccaggttgagcccggggatttcacatccgacttgacagaccgcctgcgtgcgctttacgcccagtaattccgattaacgcttgcaccctccgtattaccgcggctgctggcacggagttagccggtgcttcttctgcgggtaacgtcaatcggtgaggttattaacctcaccgccttcctccccgctgaaagtgctttacaacccgaaggccttcttcacacacgcggcatggctgcatcaggcttgcgcccattgtgcaatattccccactgctgcctcccgtaggagtctggaccgtgtctcagttccagtgtggctggtcatcctctcagaccagctagggatcgtcgcctaggtgagccgttaccccacctactagctaatcccatctgggcacatctgatggcatgaggcccgaaggtcccccactttggtcttgcgacattatgcggtattagctaccgtttccagtagttatccccctccatcaggcagtttcccagacattactcacccgtccgccgctcgtcacccgagagcaagctctctgtgctaccgctcgacttgcatgtgttaggcctgccgccagcgttcaatctgagccatgatcaaactcttcaatttaagtttgatgctcaaagaattaaacttcgtaatgaattacgtgttcactcttgagacttggtattcatttttcgtcctaggacgttaagaatccatgtcactttgagtgcccacacagattgtctgataaattgttaaagagcagttgcgacgcgctttagcgctctgtcgcgaggtcccgtataatacgttttcctcattcagagtcaagcgcttattttgcttttctctgtcggctttcaacgtcgatttccgtcgctgaatcctcctggcccggcggcttgtttgccgttgttccgtgtcagtggaggcgcattatagggggtaattctgaagtgacaaggataaattcaaaaaaagaattcaaccgctcacttttcaaccaaatcaggtattgagctttaattcttgcctggtttttaaacaaaaacgagcccgctgggcccgtttttgtcgttttgtgatttactgcactgccacaatgcggtcgtcttttactaccagctcgatggttttacccggaaccagctcaccggaaaggatctgctgggctaacgggttctcaatctgctgctgaatagcacgtttcaatggccgcgcgccgtataccggatcgtaaccattggcgctcagcagcttcagcgcctcatcggacatctgcacttcatatccgcgctcttccagacgtttatacagacgctgcagctggatctgggcaatagaggcaatatgtttctcgcccagcggatggaagaccaccacttcgtcgatacggttgatgaactccggacggaagttctggctgactacccccagcaccaggtccttcatatgtccgtagtccagctcgccgaaccgttcctgaatcagatcggaaccgaggttcgaggtcatgatgactaccgtattacggaagtcgaccgttctcccctgcccgtcggtgagacgcccgtcgtcgagtacctgcagcagaatgttgaacacatccgggtgcgctttttccacttcatccagcaggatgacggaataaggacgacggcgcaccgcctcggtcaggtaaccgccctcttcatagccgacgtatcccggaggcgcaccgaccagacgcgagacggagtgtttctccataaactcggacatatcgatacgcaccattgcgtcgtcgctgtcgaacataaagttagccagcgttttacacagctcggttttaccgaccccggttggaccgaggaacaggaacgaaccaatcggccggttcggatcggacagcccggcacggctgcggcgaatggcgttcgataccgcttcaaccgcttcatcctggccaatcacccgatgatgcagctcctgctccatacgcagcagtttgtcacgctcgctttccatcatgcgggagaccgggataccggtccagcgagccagcacttcggcgatttcagcatccgtcactttattacgcagcagacgcatggttttcccttcggactgagtggccgccgccagctgtttctccagttccggaattttgccgtactgcagctcggacatccgcgccagatcgccgacgcggcgcgcctgttcgatggcgattttcgcctgctccagctcagctttgatggtctgggtgccggagagcgacgctttttccgctttccactcttcttccagcaccgagtactgccgttctttatccgccagctcctcgttgagcatatcgagacgcttcaggctcgcctcatcagactctttcttcagcgcctgctgttccagtttcagctggataatacgccgatcgaggcggtccagctcttccggtttggagtcaatctgcatacggatgctggatgccgcctcatcgatgaggtcgatggctttatccggcaactgacggtcggcaatatagcgatgcgataaggtcgccgccgccacgatagccgggtcagtgatctgcacgtggtggtgcagctcataacgttctttcagaccgcgcagaatcgcgatggtatcttctaccgaaggctcggcgacgaacactttctggaagcgacgttccagcgcggcgtctttttcgatgtactgacggtattcatcaagcgtcgtcgccccgacgcagtgcagttcaccacgcgccagcgccggcttcagcatgttacccgcatccatcgcgccgtcggctttaccagcgccaaccatggtatgcagttcgtcgataaacagaatgacgttgccttcctgtttggacaggtcggtcagcacgcctttcagacgctcttcaaactcaccgcggtatttcgccccggccaccagcgcccccatatccagcgccaatacccgacggcctttcagcccttctggtacttcgccgttgacgatacgctgcgccaggccttcgacgattgccgttttacccaccccgggttcaccgatcagcaccgggttgtttttggtacgacgctgcagtacctgaatggtacggcgaatctcttcatcacggccgatcaccggatccagcttgccctgctcggctcgctcggtgagatcgacggtaaatttcttcaatgcctgacgttggtcttcggcaccctgatcgttcacgctttcccctccgcgcatttgttcaatcgcctgagtcacgttggcggttgttgctccggcggattttaaaaggtcggtcagcgtaccgcgtgattcaagcgccgccagaacgaacagttccgacgaaataaagttgtcctttttcttttgcgccagcttgtcgcaaaggttgaggatccgcactaaatcctgagaaggttgcacatcgccgccggtgccttccacctgcggtaaacggctcaaggcctgttcgatgtcagtgcgcagtttcccggcattcacgcccgccgaggttaataaaggacgtaccgatcccccttcctgattcagcaaggcgctcattaaatgaagaggttcgatgaattggttgtcgtgcccgagtgcgagcgactgggcatcggcaagagcaagctggaatttattggtaagacgatccagacgcataactcctcccataaacaggtcaaatttgctactggagattaaatgaggtcatccctcaattattcaaggttaaagacctgaactatgcgaaaaataagtttgccttctggatcgtcttgattctctaggttatatcagccaaatgaaacttgccatacgaccggtggtcttgtcgcgccggtaagagaaaaaatcatccttttcgcttagcgtgcagcgatcgccgccgaaaatctgctcaacgccgacgtttgccagacgctgccgcgccagttggtagatatcagcaaaatatttttcgcctgccggacgaaaagcccggtgcgcattctcgtccttcgccataaaggcatcccggacttccggtcccacctcaaacgcctgcggaccgatggcgggccccagccacgccataatattttcggctttatcggcgaaacgagcaaccgtcgcttccagaaccccttcgcataagccgcgccatcccgcgtgcgccgcggcgacttcggtgccgtcgcggttacagaacagaaccggcaggcagtcagcggtcatcaccgcgcagacggtccctggcgtacgactataagaggcatccgcgcgtttcgacggatagggtccgccgtccagcgtcagaacctcggtgccatggacctgctccagccaaaccgggtaagacggcaagccgccggcggcaaacatccgccgccggttttcttcgacatgctgcagattgtcgccgcaatgggcgcccaggttgagcgagtcatagggcggcagactcacgccgccgatgcgggtagaactacaggccgccacgctgccgggcattggccactgcggtacaatcagtttcgtcataaccagtcaatatcgtccttatgggcttcaaaatcggcgcgcatcgcctcgatgagctcgaccatatcctgtgggatgggcgcgtgccactccatttcaatgccggagatcgggtgatacaggcgcagcatggtggcatgcagcgcctggcggtcgaatttacgcagcgcggtgatgaactcctccgacgcgcccttcggcggacgcggccggccgccatagacctggtcacccaccagcggatgggtgatatgcgacatatgcacgcggatctgatgcgtacgaccggtttccagacgcagacgcaggcgggtatggatgcggaaatgttccataatgcggtagtgggtcaccgccggtttgcccatcggatgcaccgccatatgggtacgcttggtcgggtgacggctgatcggctcttccactgtgccaccggcggtcatatgaccgatcgccaccgcttcgtattcacgggtgatctcgcgcagctgcagcgactccaccagccgggtttgcgccggaatggttttcgccaccaccatcagaccggtggtgtctttatccagacgatgaacaatacccgcgcgcggcacatcggcaataggcggatagtagtgcagcagcgcattcagcacagtaccgtcagggttgcccgcgccaggatgtacaaccagatcgcgcggtttattgatcacgatgatgtcatcatcttcgtaaacgatattgagcggaatatcctgcggctggaagcgcgcctcttcttcgatttccacatcgatagcgatgcgttctccccccagcactttttctttcggtttatcgccaatggtgccattgactaatacgcgttggtcgaggatccattcttttatccgcgatcgcgaataatcagggaacaattcggccaaagcctgatctaagcgttgaccgagttgattttcggtcaccgttgcggtgagttgtactcgttgtgccatatacagcttcttcgtttaacgttgggttttacggctttgccgtttaatatagtgtgctattgtagctggtcttaatcgggagcaggaacagagattctcccgcataaacattttgaggaagtcaaaacgtcatgacgcgcatgaaatacctggtggcagccgccacactgagcctggctttggtgggttgctccggctctaaggaagaggtgcctgataatccgccgaatgaaatctacgcgaccgcccagcaaaaactgcaggacggtaactggaaacaggcgataacgcaactggaagcattggataatcgttatccattcggcccttattcccaacaggtacagctggatctgatttatgcgtattataaaaacgccgatcttcctctggctcaggcggctatcgatcgcttcatgcgtttgaaccccacccatccgaacatcgactatgtcatctatatgcgcggcctgaccaacatggccctggatgacagcgccctgcagggcttcttcggcgttgatcgctccgaccgcgatccgcagcacgcgcgcgatgccttcaatgacttctccaaactggtgcgtggttatccgaacagccagtacgccactgacgcctataaacgcatggtgttcctgaaagatcgtctggccaaatatgagctgtcggtcgtggattactacaccgatcgtggcgcatgggttgccgtggttaaccgtgtggaagggatgatgcgtaattatccggatacccaggccacccgcgatgccctgccgaagatggaaaacgcctatcgtcagatgcaaatgaacgctcaggcggacaaagtcgcgaagattatcgccgcgaacagcaagaacacctgagcctgactcatcgatcgcaaacggcagccactggctgccgtttttttatacgtttcccgacgagctgaagcggtttagcgccgggttaactcatcaaatatggcctgctttatcgggttcgacaagtaaaatctcacttcttcctgccctgtctcacaaaatgaatttgttgacaaaaagtgacaataaaatgtgatttagatcacacattttgacattgggaaaggtatgctggattcaccaagacgggaaagacaagaggtaaaatttatgacaatgaacattaccagtaaacaaatggaaattactccggcaatccgccagcatgtcgcagaccgtctcgccaaactggataagtggcaaactcatttaatcaacccgcacatcattctgtctaaggagccgcagggttttatcgctgatgcaaccatcaacacgccaaacggccatctggttgccagtgcgcgtcatgaagatatgtacgccgccattaacgaattgatcaacaagctggaacggcagctcaataaagtgcaacacaaaggggaagcccgccgcgccgcgacgtcggtgaaagaggcaggctttgtggaagaagaagagtaatccttaacttaagttgtgtcatgccacgcgccttcgggcgcgttttttattgacagagtgaaaacagtacaggtactgtaatccccactacctaaaggaatttaccatgaaacttgtcccgttcttcttcgcattcttttttaccttcccctgaccgggaggcaattcgtcgtataagaaagaatgcgaagacgaacaataaggcctccctcccgggaggccttttttatttgataacaacaaaggcaacatctatgaccgaggaaaacccattactggcgctgcgcgataagataagcgccctggacgagaagctgcttgctttgctggcggagcgccgcggactggctgttgaggttggaaaagccaaactggcctcccatcgtccggtgcgtgatattgaccgcgaacgcgatctgctggagcgcctgatgactatcggcaagcgccataatctggatgcgcactatatcacccgcctgttccagctgattatcgaagactctgttcttacccagcaaaccctgctgcagcagcatctgaataaaattaacccgcattcggcccgcgtggcgttcctcggtcccaagggctcttactcgcatctggcggcgcgtcagtacgccgctcgccactttgagcagtttattgagagcggctgcgcgaagttcgccgatatttttaatcaggtagaaaccggccaggccgattacgcggtggtgccgattgaaaacaccagctccggcgggatcaacgacgtctacgatctgctgcagcacaccagcctgtcgatcgttggcgagctgacgatccctatcgatcattgcgtactggtgagcacctcgacggatgccgataaaattcagaccgtttacagccatccgcagccgttccagcagtgcagccagtacctgagccgctacccgcactggaagattgagtataccgagagcacctcggcggcaatggaaaaagtggcgcaggcgaactccccggccgtcgcggccctgggtagcgaagcgggcggcgctctgtatggtctgcaggtgctggagcactgccaggccaaccagacgcagaacatcacgcgcttcctcgtcctggcgcgcaaagcggtgaacgtctccgaccaggtgccggccaagaccacgctgttaatggcgaccggtcagcaggcgggcgccctggtggaagccctgctggtgctgcgcaaccacaatctgatcatgaccaaactggaatcccgcccgatccacggcaatccctgggaagagatgttttatctcgatattcaggccaacctggattcgctgcccatgcgcaaggcgctgaaggagctggcggatatcacccgctccatgaaggtcctcggctgctaccctagcgaaaacgtggtcccggtggatccggtttaacattcgcggaacggtaatttcttcatccctgccaccgctaccggcagggtgaagatggcgcctgacagcggatactgcgccagctcatcgtcctccatgttttcccgggtggtggtgatatagagcgttttcatatccgccccgccgaagcagaccatcgtcgggcaacgtaccggcatcgggtaggattccagctcctcgccctgcggcgagaaacgggcgatccgccagccgtcgaacattgcgctccagtaacatccctccacgtcgatcgccgccccgtcagggatcccttcgccaggctgaaaacggcgaaagacttcgcgtcggccaggctcaccctgctcatccagcggcgtacggtagatcacggcgttcggcgtatcagaggtatacatccagcgccggtcggcgctaaaggccaggccattggcgccatggatgtcacactggatcactttcggctgcaggtcgttatccactcgcatcagcagcgcgccgttgtaatccccaggcccccagaaggtaccggcataaaagcgcccatcgcgatcggtcccgccgtcgttaaaccgcgccagctccgggttgctcgggttatcgcagactttccgccgcagcaggccgtgggcgtcggtcagccagatgccgctgcgcaatgccacgataaacccgcccttctcgcgcagggcaaaacagccgacctcctctggaaactgcagcacctggtgttctccgctgcggatatcgtagcggtgaatttcacattccatgatatcagcccagtagagggcctgctctgcctcgctccaggtcgggcattccggcaggtatccggtgtagtcaaacagcggttgtggttcagccatcgttgtcatccctataaaaaaagccagcggtcgctggctttattgtatacatctttttcgctttactgccgattatcgttcgcctgacgcagcagcgtgcggctctcgctctggaaacgctgggcgtaatcgccaaaccagtgttcgactttacggaagctgtcgataaacgcctgcttatcgccctgctccagcaggccgatcgcttcgccgaaacgctggtagtagcgcttaatcagcgccaggttgtttaccgatgacataataatatcggcgtacagctgcggatcctgggcaaacagacggcctaccatcgccagctccagtcggtaaatgggcgacgagagcgccagcagttgctcaagacgtacattctcttccgccaggtgcaggccataggcgaaggtggcaaagtggcgcagcgcctgaataaaggccatgttctgatcgtgctcaacggcgctgatgcggtgcagccgcgcgccccaaacctggatttgttcgaggaaccactgataggcctccggctggcggccatcacaatagaccaccacctgcttcgccaggctgccgctgtccggaccgaacatcgggtgcaggccaagaaccgggccctgatgcgccgccagcatcgcctgcagcggctccgctttcaccgaggcaaggtcaaccagaatgcaatccgccggaaggggcggcagcctgccgatcgtctccacggtggtgtgaatcggtacgctgacgataaccatgccggcatcggcgacgatatccgccgcccgggcccaatcgtttttttccagaatacgcacctggtagccggacagcgttaacatcttctcaaacagacgccccatctgcccaccgccgccgacgatgaccactggccgcagattcggctgcagggttttgaagcctttgtcgttttcgctggaataggattcccgcatcacgcgacgcagaacgtcctcgatcagatccggtggtacgccgagcgcagccgcctcttcacgtcgggaggcgagcatcgccgactcgcgctccgggacgtaaatcggcaggccatactggctcttcacctcgccgacttcggccaccagctccagacgcttagccagcaggctaagcaacgctttatccacttcatcaatttgatcgcgtaacgcggtcagttcagcaaccatactttcctcttaaaccaaacgggccgccaggtggccgcggagatccttatccagttcacgcagcagcgcctcggtagtctcccagctgatgcaggcatccgtcaccgagacgccgtatttcatcgcctcacgcggctgttcagaggactgattgccttcgtggatattactttcgatcatcaggccgataatggagcggttgccatctttgatctgcgcgaccacggattcagccacggccggctggcggcggaaatctttattggagttcccatgactgcaatctaccatcagcgacggcttcagtcccgcctgcgccatctctttttcgcatttcgccacatcttccggaccgtagttcggcgccttgccgccacggaggatcacatggccgttcggattaccctgcgtttgcagcaggcagacctgcccggcctggttgatgcctacgaaacggtgcggcatcgccgcggcgcgcatggcgttgatggccgtggccaggctaccgtcggtaccgtttttaaagccgaccggcatcgacaggccagaggccatttcgcggtgcgtttgtgattccgtggtacgcgcgccaatagcggaccagctgaacagatccccgaggtactgcgggctgttgggatccagcgcttccgtcgccagcggcagtcccatattgacgagctcgaccagcagacgacgcgcaatcttcaggccgccttcaacatcaaacgaaccatccatgtgcggatcgttaatcagccccttccagccgacggtggtacggggtttttcaaaatagacgcgcatcaccaggtagaggctatcgctgacctctgcggcaagggctttaaaccgacgagcatattcaatcgcagcttccggatcgtgaatggagcaaggaccacataccaccagcaggcgcggatcgcgaccggcgatgatatccgaaatggtctgacgggcgtgcgcgatctgcgcttcctgctcgacgctcagcgggaattccgccttcagttgctccggggtcattaatacatgttcgtcggtaatatgtacgttgttcagcgcgtctttttgcatgattgcgatcctgtgtagctcgtttgcgataagggttgcctcagagggcatgacgtaacgataccacacaaagtaaagaattcaatccatattccgtaaattttaatttacacaaacgaattaattgccactcacaatggcgcgatgcgtataacaatatttacacatagaaaaaacaagccaaacttgcgcacccacggtatcggtactacgaaaaatcctggtgagaattgtcccaaagcaaagggcgcatctaatgacgggttttattaacagtggtattcttcgccgggcatcggcagcggcttttcccgcgctatggcgactttgacggaagcgttaatgacagtattacaccgtcttttattgactgtattttttctcatcgcggtatctcctgtttttgctgccggaccttcagaacatgttcgcgctattgtttccgggatcgtgacctacacccgttggccgtcattaacaggagcgccaaagctgtgcatttttgcctcatcacgcttcacccatagcctggctcatgaagatccggatgcattaccctatcaaccggtgatagtacgtaatcgtgaagaagcgttaaaaacgacctgcgatggtttttattttggcagcgaatcgccgactgaacagtcagaactcactcgccgctatggcccgaggccgctgttactcatcgcagaacaaaatacggattgttcaattggtagcgcgttttgcctgatcatcaatgacgaccgggtccgcttctccgttaatctggacgttctgacgcacagcggggttcgggttaacccggacgtcctgatgcttgcccggaagaaaccacatgaataaggacttttcacagactccgcgcccgactttcaaacgcgcgctccgtcgcattagcgtgataagcgtggtgatctccatgacgctggtctggctgctgctgagtacagcctcaatcttcacgttcaagcagtacgcgcagaaaaatcttgagctcactgccgcgaccatggggcgcagcctcgaagccgccctggtgtttggcgacagcgcggcggcagaggagaccctcgcgtcgttgggcaagcaagggcagatctcccaggcaatcgtgctaaacggccagatgcagcacttcgccgcgtggcgccatgaaccgctggccaacaaagagcaagtgagcgggcttatcagtaaatggctgtttccggagcccacggtgcagcccatctggcaccagggcaaacaaatcggcgagctgagattgaccgcgcttgatgaactgattagccactttctcggtatctcgattctggtgctgaccggcagcattctgctcgcctcgttcatcgccctgctgctgacccactccctacaccgggggatcgtcgccgccctgcagagcatcactgaggtcgtgcatgatatacgtgaaaaccgccacttctcccggcgggtgccggaggagcgtatcgaggagttccatcttttcgcccaggactttaacagcctgctgggggaaatggaggactggcagcgccagctgcaggccaaaaacgcgcagctgttgcgcagttcgttacacgatccgttgaccggcctggctaaccgcgccgcctttcgtaacgcgctcgccgagctgatgcagaatgaagtcgatcatcaaacctcggcattgctgtttcttgatggcgataatttcaaactgattaacgacaactgggggcatgcggcgggcgataaagtgctgatggaggtcgccagccgcctgatgacttttgccggtaaacgccatctggcgtggcgtcttggcggcgatgagtttgccgttctgctgcgcgaggtgcgctcggaagcagaagtgcaggccctgtgccaggcgctaacggaacaatttcttccgccattcaacctgcacaacggtcatagcgccacgctctcgctgagcgtcggttatgccctggcgtgggagcacgccaccgcggaatcactgcaagaacttgccgatcagaatatgtatcggatgaaaaaccaacgtatccagcagacgctgaaataataaaggactcattatgatcagaaaatatttcgtccccgccctgatggcggcggcgcttttgacaggttgccaggctcctcagggaaaatttaccccggagcaggtggcggcgatgaaatcttacggcttcactgaaagcaatggcgattggtccctgggcttatccgatagcatcctgtttgacaagaatgactaccgactacgtcccgacagccgccagcagatcaccacgatggcctcgcggctggcggctaccgggatcacccatagccgccttgaaggccataccgataattatggtgaagatagctacaatgaagccctgtcgcttaagcgggccaacagcgtggccgatgcctgggcggaaggcgctcatgtcccacgcagtaatttagtcacccgcggccttggcaaaaaatacccgatcgccagcaacgacacggcggccgggcgcgccgaaaaccgccgggtaacggtggtcatcagcacgccgtaagtcttcacttagtcgctggacttcatcatcctcattgccgttgccgcgcgccagcgcaggtagtcaacggcaatgaacagcagcaggctggctcccattaacggcatggccaatccaagggcaaacgccagcccaagcaccaggcttcgggcaggccaggcgagcgacagccacgcctgcagcagcgaatgcgccggatcccaggccgcctgaggcggacggcggatccaccataaccggtaccccaccccgatggtaacgcacagcgcgcagccaaatcccaccagcagcagctgattcgccagaccaaaaaggatccccatatggaaatcgacgccccagcgggtgagcttcgccatcagcggaaagtcggcaaaacgcgtgcgatccaccacctgcatcgtggcgccatcgatcgccaccgcgtccacctgcgtcggccagcgacggtcgatctcattcaccgtccaggcgcggtcgtctgacactggcggacggatctccagccggctggcgttcagccccgcctgacgggccgccgccagcgcctggtcaaactgggccaactgcagcgccggctgatgctgggccatggccatcgcatccatatgatgtccggcatggggatcgtgcgtcatcggcatctcgccatgcagctgggtattgacctgcggcgtcagccagccgaacgctgcccgcattttgtccacattgccgccggcccattgcgaccaggtcaggccggtggcggagaagagcagcatacccaccagtaagccccagcccagcgtcacgtgcagccgacgatggttctgcagggcgttattcagccgccgttttggacgcgtcatcgcccacagggcaatgcctccgagcgcggccacccacatccaggaggcggccagttcgctgtataacctcccgctgtcgcccagcagcagagagcgatgcgcataatcaatccactggcgcagcggcaggatgccgctggtgccgtagaccgtcatatcgcccttcacccgcagcgcgatcggatcgacaaaaatagcccgggattccgactctccgagacccggatcggcaaacataatgcgcgtggtctcgcccaacgcaggcgccggacgcaccgccagcagccgcagattgccctgggtcgcttcttcggccaccgcaatctgggcgctgagcggctgcggagtcccctcggcaaggccatgcagcgcgtcgtgatagagccagttttccagctgcggcgtcgccacgtacaacgtgccggtcagggcagcgacaaagataaacggtccgataaacagaccaatatagaaatggaggcgacgcagcaggttcagccatgccgcgcgcgaggtgcaggttgtcatacttttccttttttaaagcaaaagaggttgttgcgcggtgcgcagattgatttttattaaagggaaaaagcagacagccgcggcggggcgcgggtttcggggtagagccagggaaagtagtgccagtgctttaataccgggcgagaaaccggcaggcgaatgcgccgcaggagcatggcgacgaacagcgccagcgcgaaaaggagccccgggacatgggctaacagcacgcaatagccacacgcttcggcatggtccagcagcatttcgtgtccggtatgcgtagcgccgtctgtgctgtgcatcatcgccatcttgtgcccgggcatctgcgccatgctcgcggacgagctatccatcatcatggcgtggtgcatgccgggcatggcgcttatggggtctttttgcagggagacggagatcaggggggccaccacgatcagcaggatcgccaacagcgccagccaggcggctcgccgtttaggtgtcgtttgctgaaaactgttactgaccaccgcccctccgtatagagggcgtattgtaaatgatttacatcacgatggttacaacaaagataaaaaaagggccagccatctggccagccctttctatcaggatgtcgcgaaagcgaatcttagttaagacgctctttgatacgagcagacttaccagtgcgctcacgcaggtagtacagtttagctttacgtacagcaccacgacgtttaacagcaatgctgtcaactaccggagagtgagtctggaagacacgctcaacgccttcgccgttggaaattttgcgaacagtgaatgcagagtgcagaccgcggttacgaatagcgataaccacgccctcgaatgcctgcagacgttttttggaaccttcaacaacccatactttcacttccacggtatcacccggacggaaggaaggtacgtcctgcttcatctgttcttgttcaagttgcttaataatgttgctcataatttaatctcttatcctgggtaaactgatattgggggctcacgcctgcccatcatgtttatgctgctgttgcgcgtgttcagttttgaactccgccagcagctttgcttgctcttcagtcagagccaggttttccagaagttcaggtcttctaagccaggtgcggcccagcgactgcttcagacgccagcgacgtatctcagcatggtttcccgacagcaatactggcggtacttccatctcctctaacacttcaggacgggtatagtgggggcaatccagcaacccatcagcaaaggaatcttccgttgccgatgcttcatggcccagtactcccggaatgaaccgggaaacggagtcaatcagcgtcattgccggtaactcaccaccgctgagaacgtaatcgccgattgaccattcttcgtcaatttcggtttggattacgcgctcgtctatcccttcgtagcgaccgcacaccagaatcagtttctgattcgttgccagttcgctgacgcccgcttgatcaagcttgcgtccctgaggtgacagataaatcaccttcgcgccttcacctgccgcggcttttgctgcatgaatggcatcccgtaagggttgcaccatcattagcatccccggtccgccgccgtaaggacgatcgtccacggtacggtgccggtcatgcgtgaagtcgcgaggactccagctttcgatgctcagcaggccattttttactgcccggccagttaccccgtaatcggtaattgcgcggaacatttcaggaaacaggctaattatgccaatccacatagcgccgtcttttaccgtttatccggagaatttaaaaaccaggatcccaatctacttcgatagtacgcgtagtgagatcgactttcttgataacctgcccatcgaggaacggaaccaaccgctccttgataccaaatgcatctttcaggtttgccttgatgacgagcacgtcattcgacccggtttccatcatatcgatgactttaccgaggctatagccttccgtcgtaactacctggcagcccatcaggtctttccagtagtagtcaccctcttccagctccggcaactgcgatgaatccacgataatttcgcaattagtcagtagattcgcggcatcacgatcgtcaacacctttcagcttgatgatgatgtcctgattgtggtggcgccagctttccagctcaacgacctgccactgacccgccttctggattaaccagggctgatagtcaaaaatgctttcggcgtcttcggtggaggaaaacactctgagccaaccacggataccgtaggaagaacccattttccccaatacgatcggatcaacaggtgcttgcgcggtgtgttgcttgctcatcatgaccaccgtgacagattaagctgctttgttagcggctttgatcagcgcggcaacgcgatcggaaacagtagcgccctggccaacccagtgagcgatacgatccagatccaggcgagtttcttcttccgcaccgttagcgatcgggttgaagaaaccaacgcgctcgatgaagcgaccgttgcgtgcattacggctgtcggtgacaacaacctggtagaacggacgctttttagcgccgtgacgtgctaaacgaatagttaccataacatcctcttgtgtgaataaaacaaccgggccccatcgaggaacggagcccggtgtcatattaaaagcccgaaaattttactgatttctggggaaaatgcaatcagcagttgataagtctgctgtaaaaggccgtcggcggtgcagccagtttagtaccagcgtgtgcgcaaccactgtaacgtacaggtagtacgtgaggatggcgagcacaccccggcgctaaaatggcaaacaagataaccttatgcccttgtttttaacgacccgggaagcctggcggcatcatccctttcatcccgcgcatcatcttcatcatgccgcctttcgacttcatcttcttcatcatgcgctgcatgtcgtcgaactgcttgagcagacggttcacatcctgcacctgcatgccgcagccggcggcgatacggcgcttacgcgaacctttgatgatttccggcttagcgcgctctttcagggtcatcgagttgatgatcgcttccatacgcaccagcactttgtcgtccatctgcgctttcacgttgtccgggatctgccccatgcccggcagcttgcccatcaggctggccatgccgcccatgtttttcatctggcgcagctgctcaaggaagtcggtgaggtcgaaaccgtcgcccttcttcagcttggaggccagcttctcggcctgcgcgcggtcaaccttgctctcgatatcttcgatcagcgacagcacgtcgcccatgccgaggatacgggaagcgacgcggtccggatggaacggctccagcgcttcggttttctcgccgacgccgaggaatttaatcggcttgccggtaatatggcgaatcgacagcgccgcgccgccgcgggcgtcgccgtccactttagtcagcaccacgccggtcagcggcagcgcttcgttaaaggccttcgcggtattcgccgcatcctgaccggtcatcgcatcgacgacgaacagggtttcaaccgggttaatggcggcgtggacgtgcttgatttcgtccatcatcgcttcgtcaacgtgcagacgaccggcggtatccaccagcagcacgtcgtagaatttgagtttcgcttctttcagcgccgcgttgacgatatcaaccggcttctgcccgacgtcagacgggaagaaatcgacgccgacctgctcggccagggtttccagctgtttgatcgccgccgggcggtaaacgtccgcggaaacgaccagcactttcttcttgtgcttctcgcgcaggaatttccccagcttaccgacgctggtggttttaccagcaccttgcaggcccgccatcagcaccacggccggcggctgcgcggccaggtcgagcgtctggttctcttcgcccatcgccgccaccagctcgttgcggacgattttgacgaactcctgacccggggtcaggcttttattgacttcatggccgaccgcgctctctttgacgcggctgatgaaatcacggaccaccggaagcgcaacgtccgcttccagcagcgccatgcgcacttcgcgcagggtgtctttaatattgtcttctgtaaggcgtccgcggccgctaatgttgcgcagcgtacgcgacaaacgatcggttaaattatcaaacattgtctctcgcctgaggtggaaacggtcggtcgccgcagcgacacacaaaacgaatgtggcggagtataacacgacatcaatctgaatgtgctgcaacggttggagcagaggcctgctaacgttatactgcttctctttcttatttagccaacagccgacacctatgcctgtttttgctctactcgcccttgtcgcctactccgtcagcctcgcgctgattatccccggcttgctgcaaaaaaacagcagctggcggcgaatggcgattttatctgcgactatcgccttgatctgccatgcttttgcgctggaagcacggatattccccggcggcgagagcgggcaaaatctcagcttactgaacgtcgggtcgctggtcagcctgatgatctgtacggtgatgactatcgtggcctcgcgcaatcgcggctggctgctgctgcctatcgtctatgccttcgcgctgatcaacctggctttcgccacattcgtgcctaacgaatatatcacccacctggaaaccaccccggggatgctggtgcatatcggcctgtcgctcttctcgtacgccacgctgatcattgccgcgctgtatgcgttgcagctggcgtggatcgactaccagctcaagaataaaaagctggccttcagcagcgaaatgccgccgctgatgagcattgagcgcaaaatgttccacatcacccaggtcggcgtggtgctgctgaccctgacgctgtgcagcggcctgttctacatgcacaatctgttcagcagcgaaaatatcgataaagcggtgctgtcgattattgcgtggttcgtctatatcgtcctgctgtgggggcactatcatgaagggtggcgcggacgtcgtgtggtctggttcagcgtcgctggcgccggtctgctgacgctggcctattttggtagccgcgtgctgcagcagttcgtgagctaagtcttttaaggaatcctacgtggaacatatctccaccaccacgctgatcataacgctgatcgtcatggtgattatctctgcctatttctccggttccgaaaccggcatgatgacgctgaaccgctaccggttgcgccacatggcgaaacaaggcaaccgccccgccaagcgcgtggagaagctgctgcgcaagccggaccgcctgattagccttgtgctgatcggcaataaccttgtcaacattctcgcctcggcgctgggcaccatcgtcggcatgcgcctgtacggcgacgccggcgtcgcgatcgccaccggcgtacttacctttgtggtgctggtatttgccgaagtgctgccgaagaccatcgccgccctctatccggaaaaggttgcctaccccagcagcttcctgttggcgcccctgcaggtgctgatgatgccgctggtgtggctgctgaataccatcacccgcatactgatgcgcatgatgggcatccgcaccgataccgtcatcagcagcgccctgagcaaagatgaactgcgcacgattgtgaatgaatcccgttcacaaatctcacgacgcaatcaggatatgctgctgtcggtactggacctggagaaggtcagcgttaacgacatcatggtgccgcgcaatgagattgtcggcatcgatatcaatgatgactggaaatctatcgtccgccagctgacccactccccgcatggccgcatcgtgctctaccgcgattcgctggacgatgccatcagcatgctgcgcgttcgcgaagcctaccgtctgatgacggagaagaaagagttcacaaaagagatcatgctgcgggcggcagatgagatctactttgtgccggaaggcacgccgctcagcacccagctggtgaaatttcagcgtaataaaaagaaagtcggtctggtggtcgatgaatacggcgatattcaggggctggtcaccgtcgaagatattcttgaagagattgtcggcgacttcaccacctccatgtcacccaccctggcggaggaagtgaccccgcttaacgacggcacggtgattatcgacggcagcgccaacgttcgcgaaatcaacaaagcgtttaactggcacctgccggaagatgaagcgcgcaccgtcaacggtattatcctcgaagcgctggaagagatcccggtcccgggcacccgcgtgcgcattgagcagtacgatatagatatcctcgacgtgcaggacaacatgatcaaacaggtgaaagtgatgccggtgaaatcattacgcgagagcgtcgcggagtagcgcgagcgaaggaagtaatatcacggtgggctgcggcccgccgtttttttatctcgcgccagcagcgatgacacaaaaaacggccgcccgcaggcagccgttgagcaaggcagcaagcgttatttcgctttcgctaccgtcaccatcgcggcgcgaatagtacggccgttcagggtataacctttctgcatcacggacagcacgttgcccgccgccacatcttcagactcgaccatcgcaatggcctggtggacgttcggatccagcggaacgttggtgtcggcgatcacttccacgccgaacttacgcactacgtccagcatagatttcagggtcagttcgatcccttccaccatcggcgccagctccggattagccttgtcggccacttccagcgcgcggtccaggctgtcgatcaccggcagcagttcattgacgaatttttccagcgcgaatttgtgcgctttctcgatatcctgctcggtacggcgacgcaggttatcttcgtcggctttggcacgcagcatcacttcacgttcacgtttctgcgcttcagccagctgggcttccagattcgcaattttttcatcgcgcggatccacctgctcagccgaaacttcaggctctactgcctcaacgtcgtcgtgctgctccgtgataatttcttccggggcttgcccctcaggcgttttctgttctttactactcatgaatttctccgcgtttttttcgcattcatctcgctaacttcgcttattatggggatcagtttccgggtttcaagggaagcggacagattgtcactatttcatttaacgcaaggacatccagatcatgaagaaccatttcaagtgtatcggcattgtgggacatcctcgtcaccccaccgccctgaccacacatgaaatgctctggcgctggctgtgcagcaaagggtatgaagtgctggttgaacagcagatcgcccatgaacttcagctcagcaacgtgaaaaccggcacgctggcggagattggccaacaggccgatctcgcggtggtggtgggtggcgacggcaatatgctcggcgcggcgcggaccctggcccgttacgacattaacgtcatcggcattaaccgcggcaacctcggctttctcaccgaccttgacccggacaacgccctgcagcagctcgccgacgtgctggaaggccactacatcgccgagaaacgctttctgctggaggcccaggtgtgtcagcaggattgccagaaacgtatcagcaccgccatcaacgaagtggtgctgcaccccggcaaagtggcgcatatgattgagttcgaagtctatatcgacgaagtctttgcgttctctcagcgatccgatggcctgattatctccactccgaccggctccaccgcctattcgctgtcggccggcggcccaatccttacgccgtcgctggacgccatcaccctggtgccgatgttcccgcacaccctttcagcgcgaccgctggtgatcaacggcgacagcaccatccgcctacgcttctctcaccgctgcagcgatctggagatcagctgcgacagccagattgccctgccgatccaggatggcgaagatgtcctcattcgccgctgtgattatcacctcaatctgattcaccctaaagattacagctatttcaatacattaagcaccaagctcggctggtcgaaaaaattgttctgattttcacggctgcctctttactggataaaaaaccagtctatactgtacgaaaacacagtattggtttttcatacaggaaggcagctatgttggcgcaactcaccatcagtaattttgctatcgttcgtgaactggaaattgatttccacagcggcatgaccgccatcaccggggaaaccggcgccgggaaatccattgccatcgacgcgctggggctgtgcctcggcggcagagcggaagccgacatggtgcgtcgcggcgccacccgtgccgacctgtgcgcgcgcttcgcgctgaaagatacccctgccgcccagcgctggctggaagagaatcagctggagagcgggcgtgagtgtttacttcgccgggtgatcagcgccgacggccgctcgcgcggcttcatcaacggcaccgccgtcccgctctcgcagctgcgcgagctgggccagctgctgatccagatccacggccagcatgcccaccagctgctgaccaaacccgaacaccaaaaaacgctgctcgacggctataccggtgagtatgcgcttactcagcgtatggccgagcactatcgccagtggcaccagagctgccgcgagttggcccagcatcagcagcagagccaggagcgcgccgcccgcgccgatctgctgcagtatcagcttaaagagctgaacgaatttaacccgctgccgggagaattcgagcagattgacgaagagtacaagcgcctggccaacagcggccagctgctcagcacctgccagcacgcccttacggtactggcggacggcgaagaggccaatctgcagagccagctttataccgcgaagcagctggtcagcgagctggtgggcatggacagcaagctttccggcgtcctggatatgctggaagaggcggccattcagcttagcgaggccagcgacgagttgcgccactaccatgaccgtctggatctcgatccgaaccgtctgtttgaacttgagcaacggatttcccgacaaatcgcgctggcgcgtaaacatcaagtgatgccggaagagctgccggcggtttatcaggcgatgctggaagagcagcgcctgctggacgacagcgccggctcgctggaatccctcagccagcaggtggtcgaacatcatcagctggcgctggagaccgcacgccagctgcatgccctgcgccaggccagcgccgacgagctgacccagcttatcaccgaaagtatgcactcactttcgatgccgcacggggtcttcgcgattgaggtcgcgttcgatgaacgccatctcaccgccgacggcgccgaccatattgagttccgcgtcaccactaaccccggtcagccgctgcagccaatcgccaaagtggcctccggcggcgaactgtcgcgcattgcgctggcgattcaggtgatcaccgcgcgtaaaatggaaaccccggcgctcatcttcgacgaagtggacgtcggcatcagcggcccgaccgccgccgtggtcggcaagctgctgcgccagctgggcgagtccacgcaggtgatgtgcgtgacccacctgccgcaggtcgcaggctgcggccaccatcatttctttgtctgcaaagagaccgatggcgagatgaccgaaacccatatgcagccgctggataaacgtgctcgcttgcaggagctggcccgtctgctgggcggcagcgaagtcacgcgcaacaccctggcgaacgcgaaagagttgcttgcggcgtaaactttttgattttcacagggtcatagtgaacagcaaattgcctgctgacctgcagccggaggtttccaacggcgcgaaggtctattattatcggcatattacagatgagccacgtactgctcgggcccaaaaaggaatcaaatcactatgcgctgtaaaacgctgactgctgccgcagcggttcttcttatgttgaccgcaggctgttccactctggaacgagtggtttaccgtcctgacatcaaccagggtaactatctggcaccaaacgatgtagcaaaaattcgtgtcggtatgacgcaacagcaggtagcttatgctctggggacgccaatgatgacggatccgttcggcaccaatacctggttctatgtcttccgtcaggagccgggccaccagaaagtgactcagcagaccctgaccctgaccttcaacagcggcggtgtgttgactaacattgataacaagcctgcgctgaccagtcagtaaggcccggaaaagcaaaaagcgctcggtgagcgctttttttatggctgatagccggtctgctgcaggttactttgcggcgcttttctctgcccgctggcgacgcagctctttcgggtctgcgatcagcggacgatagatttccacccggtcgccgtcgtgaacttcgtcatgcagctttaccggacgactgtagatacccagcttgtttttcgccagatcgatgtcatcacgcagcgccagcagaccgctggcgataatcgcctgctcgaccgtcgccccctcgtccagggtgacccgctgcagatactgcttttcaggcagcgcgtaggcgacttcaacacgaatattagccggcactgtaaacctctttggcgcgcgaagtgaacgcctgcaccatgttagcggccagctctttgaagatccggccaaaagccatctcaatcagtttattagtaaactcgaaatcgagatggaattcgattttgcaggcctcggggctcagcggaataaacttccagccgccaatcagcttcttgaacgggccatccaccaggctcatcaaaatgctctggttgctggtcagtgtattgcgtgtggtgaaggtcttactgatgccggctttggacacatcaaccgccgccgtcatttgcgtcggccccaattccagcacgcggctaccggtgcagcctggcagaaaatcaggataggacttcacatcgtttaccagttgatacatctgttccgcgctgaaaggcaccagcgcagtacggctaatctgaggcatagcaggttccacatttaaacacagtgcaaataatatcatttatctgctgctaaaaaaaacgctgtgccgcaactcgtgctaagatgcgcagtacacctcgcaggatgcgatcgaggtaactgtgtataagacgatgacttcaggacattatgactaagaaaaaagcccacaaacctggatcagccaccattgcgctgaataaacgcgcccgtcacgaatactttatcgaagatgaatacgaggctggtctcgccctgcagggctgggaggtcaaatccctgcgtgcaggcaaagccaacatcggcgatagctatgtcatcctgaaggatggcgaggccttcctgttcggcgccaactttacgcctatggccgtggcttccacccactatgtctgcgacccgacgcgcacccgtaagctgctgctcaaccagcgcgaactcgacacgctgtacggccgcattaaccgcgaaggttacaccgtcgtcgccctgtcgctgtactggaagaacgcctggtgcaaagtgaaaatcggcgtcgccaaaggtaagaaacagcacgacaagcgtaccgacctgaaagatcgtgaatgggcgctggataaggcgcgtattatgaagcacgccggacgttaatttcccctccccgagggccagctctcgctggcccttacgctatatccttgttgatgctgctttttcgtccaccctgctgaaataatcctgcgtgatggggctggtaacgacattcacaaatctgttatacttgacctacacattggggctgattctggattcgacgggatttgcgaaacccaaggtgcatgccgaggggcggttggcctcgtaaaaagccgcaaaaaatagtcgcaaacgacgaaaactacgctttagcagcttaataacctgctctgagccctctctccctagcttccgctcttaagacggggatcaaagagaggtcaaacccaaaagagatcgcgtggatgccctgcctggggttgaagcgttaaatctaatcaggctagtttgttagtggcgtgtctgtccgcagctggcaagcgaatgtaaagactgactaagcatgtagtgccgaggatgtaggaatttcggacgcgggttcaactcccgccagctccaccactttagataggactgcaaccagacagtgatagttaaaacagtcacttacggacaccgaccagacggtaagcagaccaaataaagacaaaaatatgcacgcaaaatgcacgtgcacttcaaaagaaccccagatttcacagtctggggttttctatttgtaaataatcgtaacaaaaatacacacctaaaaagcatagacaccaggcatacactggatatacttacagcaatacaactgtatatccagccagtaaatcgaggtgttgatcatgcgtgtagaaatcagcattgccaaagagaaagccgggaaaatgccaaagggttcactggaggctttgaaagacgagatgacccgccgtgtcagtaagcaatatgacgatgttgaagtgatcgtgaaaacggccagtaatgatgggctgagcgttttgtgggcgactgataaggaaattgctaaggagtttgtagagactactctgaaagacgcctgggaaacggctgatgactggtttataaactgagcagccaatacaatcattcacggtgtccattccgggcatctgtccgccgggtagctcttgcatacggctaccgggcgggcttccttatcccgctgggaagtacttataaatagtcttcaccccaaccccgatgacatctgccacctgctgccgggtagagccgttctccagcattctgcggcaccgctccaccacttcttcagtcattacccggcggcggccgccgactctcccctgctccctcgctgcggctaacccggctcgggtacgctccacaatcaactcgcgctccatttccgccagggcgctcatgacgtggaagaagaaacgtcccgcaggcgtcgaggtgtcgatgctgtcagtaagactgcggaaattcaccccgcgcgcctgcaactccgacacgagcgtaatcagatcgcgtacgctgcggccaagccgatccagcttccagaccaccagcacatcccccgggcggagccgccgcagcgctcgctttaaccctggccgccgggcatttttcccgctggccatatcctcaaaaaccagttcacattctgcgcggatcagcgcgtttttctgtaaatcgaggttttgatcccctgtagagacccgtgcatagccaatcagcatgttgtaacccgttgaaatagctgattgtaaaaagctgcggccattcgctcaaaccctcgtttgggcgaagcctctttttggagcaaaaaacatggcctttaacccggagctggggagcacgtctcccgctgtgttgctcgataacgccgagcgcctggataagctggtcaatgggcccgccgcagatgtccccgaccgtggtggtgagcctctttattcatggcgtcagatgatggcgaaaaatgatgagatacggcagaacatcattccgctcagcaagcagtatgcgacgctggcagcggcccaggcggatatagcgaatattccggtgaactccacaacctacgtgcgtagcccggacggcagtgcgctggctgacgagtacatgaatgtagccgggacgctgactgccaccgggcgcaggatgccgtcacaggcctacgttgatggtatgcagggagatatcgactcgctcaatcagatgcggattacgttatcagattcgctgagcgacacatggcgggacgaccgtgatgacaaaacagaggtagttctggtggcggataatgcgctaaggaaacttgtcaaactaaatatcgaaaagcagaaactggttgtgttcgggaatgaggtaccgcgacagggcgaagtggatgaggccagggaggcaggatctgaaacatggtcctacaacggaagtgatgcaggcaggataattcttctggcggacagtgccggccgtattgttcgggagttgcgattatctgagcaggcggaatacctgttcggtaaaaaggtcggcaccggcggtgacgccagttacacccccccgcaatactggcctgagtttgtggactgtcgcgcattcggacaaagtctttccatcagcctgaacgctggcgccggaatactcaccccggtaaccaacgcatttatgtttgatacggggatcgtaacgtataacaaaacactcacctcactggtcaccgtacccgacacaacaacgcagcaatatcacgatacgagcctgattcatcagctggaatatgattcgccagcaccagacagaaagtatatggctgcggcgtctggcgtgagtggttattccatggctcagctcgaaccagggactgaaccttacacccagctcatgtccagcatagataaagcggcacagcttgcagcatcggctggctatcagtacgggttaccagttctgacattcttccagggggaggcggatgcgtatctcggtagttcttactcttactaccgtagcaaaatggttttgatgcagtcctcaatcaacgacaaagccaagagtgtttcgcgcgcaacctctgatatgccgatgattatttatcagatggcgtctcagggacgatatcagggattagtcaacccgagctctgatattccgcgagctcagctcgatgaggcaatcagtaacccgctgattcagttgtgtaccccgatgtatattttcccttatacagacggcgtgcatctgacgaaccacggctaccgctggcttggccttttccgcgccaaggcgatccgatactggatggaaaacggaaaaccgtggaagcctctgtatccgatcgacatttataaagttggctcaaataccgtggtggcggcgtttcatgtcccggtcggcaaccttcagttcaggactgacattgtccccgaacacccgtccggagcaaagggttttgagctgtggcaagagacgtccgatcccaatgtgttggaacgtcttgagatcgcctccgttcaattgaatggaggcgacaaggtgaaagtcaccagcgccaccccattcaccggaaaagtctatctcggttatggctggacgccgctcaaccgtggcgcatctgacggggcaggccgctatccgtcatggaacgccggagtcaacagcggtatctgtggaaacctctgtgactcagacaactcaaccactgatctgcatgatgcagctggcaatgcgtaccagctgaagaactattgctgctgcttttataaggaagccatctgatgccgtatctattcactcgccttaattttgaagtcccgttttccgatgcggaatatctgaatgagtctgacgtcagccgggtgatctcagcggtgactccgcagcctggcttcttcaactggttgtttggcggctcatctgccagtctaatctcttacgacggcgctcatgccatgacgcaagccgatccaacgttgaccataatgtacggtgacaattacgtacagttacctgccagtgcgggcgcactgaaaaatggcctccagactgaatggggagataccagcatctatacctggtgtaacgtcattcagtattcaggagctgcttctcaggtgcttggtggggctacagataactcgacaggtgaagcggtgcagatttcctctgccggggaaattgtttttgcctataaagagagcggcacgggcacaaccaaatcgcaggccataccggtaccgcccgggctgagcgcgggagcgaatatttttatcgcagtcacgcgcagcggcagcaacctgatagttttcgttggaggtgcggctacaaaactgacactgacagcggcaaaaaacgccaatgctgccttaaaaattggccctggtaacacatcctatacaggcgcggcaggctactctaaagaactgcgctgttatgagttcctgtactctaccagcgcagtatctgccgcagatctggataatatctatgccgcggcaaaagagcgctgtgcggcgagggggatcagcgttctgtaaattctgtaggatgcggcagtcataacattggcagccgcatttatttacactttcaaagtaacgttgaaagaagagcttcaaaactcgtgaattgctgagccggggaataatcttccggcacaaaatagcgatacaccttagcctcaaatggtgctgagacgtaaagcacatcaccgccgtttcctggtgcagaccccatgcgcagaagtgtgggggcgctgttgccgagtaccgagtagacccatccagaacctgcattttccgccaggacaatgacagcgactgtattcccggaagacgtgtattccaccgaaaaatacaccctccgctttccaccctgaacagttgccgccagtgctgcggatgtgtttccccgctccggcgggacatatgcgatctgctgctcgctccatgcagaccccgcccatgtcgcaacgtagaccccgaacttactgaaccaggtcccggaaggatcatccacggttctgaaacggtaagtgatatgcgacaatccctcgccatcaaacgcaaatttcgcagactgaatccccattttcagcccgtcacttatcgccgggttttcacccggctgcaatggcttatacgccagctgtccctgcgttaccggcattggcaggggcgtgttatttatcgttctcatcagtccatcggtaccaatgacgccatattccccaacatgacgaacggcagaggatgggtaatgtgcccactggaacagaaggtgtaggccatcggcgaacgccatcatatcgtccgggtagatggaacggttatctgcttcggctacgggggcatagcgctcccacgttttcgaggccagacggtagcgataaacaacccccggacgcttggtatcgtttaccggggtacggttagaccggcgcatcatgacgtatacgtcaccttccggtcccctggctaccgtggggtaagtataggtccagtctacgtcggggaagttccacgacgcgtccaccatattcgtaacatcatttggcgctgcacttttaaaatagcgcagaaggttcatgtgcattgaagtgaacacgtggatgtacccgtcgccgtcaacgatcacagatgggttgttatgcccgatatcattgtcgaattcggcggtagttccatccgtgtttttgcagaggctacgggtcaacgtgccgtcagcggcacgttttaccagttctacctggtgcttaccggcgaccccatattctttacaaatcccgtaatactccgccccctgaaagctatccagcgggtgccaccacccagcctggttgctctcagacgcagagtctgagatcaatgatgacgtgaaattagccattgaccgtcactccgagatacttggcgcgcttgatcaggcgttctgcgacttggattagctcgctatcgctcagctttctgtcgtagaaagcagcgccataagccttccaggcagcagcagtaccgttttcccagtttccgccgatgaaagtatcggttgtggttgtgttcaccgctgtggagtcaaccttctgtacaccggttgacgtcgccatgccgaaagaatggccggttaagtcgccttttagaaatacgacgaaagctccggtcgctggagccgtgatattcgataaacttgtccctgcatccatcactcgccaaatttttttatttgcatccgtcatgatgcggatatttcgatgccgaataacccctgcgcttgcgcctacatcaacgagtgcgatcagggtgtaagcatccggtgtaaaattacccagcgtcaaacggctttcggtccctgccgctgcctcaatacctttagcgacaagctgtgcgacgcctgacagtgcaaaggaaccgccgttcttgccccaattcttgagtctacgcgcctctgtgagggcgttactctccagatttgcccatgccagaggaccagataccggcggaagataattatttgcgtacgctgatgcatcagtgccagcggccataattgctgtgcccatagggagactcctttactgtaagttaagtgcgcgctcagccatacgctggcgggaattgtgatatacggcctggacctgttgcgcagaaagcgaatggtcgaagtagatgaattcagcgatgtcgagatttttggttttgaacatggcgttatcacaccacccgttgccaatggcgatgttgcggccggaaagaatcaggcgatctgcatcggcctcgcgcagcatctgatattcttcgccacccacgctgattgcctggtaacgcagcccgctgccctcaagtttcactacatgtgaaatgaacagccactggccgacaggcggttgtagtgtcggataatgccgggacgttcccaggtaaccggaatttttcacacgcagccatcgccgatcatccctgtcggaaaacatcgacagctgattgccggtgtaggtgtcgtcgtcatcccgaagtgaatacccgttctgtgtgccgtaaatcaccacgcagtcggttaacggggcctgttcaggtaccctgaccaccgcgcagacagtgtattccccggcatcggggatatcggtcatcagcgcgccgccccaggcggagatcgaaatgtaattgttattgaattccggcgcggcctgcggtgtcagcgttttataccccacacggcttgtatacgacgtggactcatagccaaacagccagtgcgctgctgcgctgctctccagcacagagggcacaggttcgacgctaccgccgcctccattcttgctgaccacatcaccatttaatttcacgccttcgataacatacccgaaggggtcaacggtacagcgtgcccagtccggcgcgtcaaatatgatgttatccccggcatacagccgcccctgcttatcaaccagaatcagctcgttcccgaattcatcagggaaggaaataagcgactctgaatctgacaactcattatttccggcaaccagcgcgcctctttcggaaaacaaattcaccgcataaccgaaatcatcaaccagcgtcagtagcggccctgtctctgactggatcagtctgagttttctcgtttcgaaacttttctcagtgatccgcccggcttcatatccccattcatcgcataaagagagcatggtctggtcatcgctgctgaatatcagacctgttcgggccatgacctctgccgttaccgcctggctgatggccgccaccaggtcatatgaaggcatacggcggccggtaggctgcagcgtcccgccaacgttcatcacctcgattgcgagcgcgctgtcgtccgggctacggtagtacgtggtcgagcccaccggaatattcgcgatatccgcctgtgcagcctccagcgtttgatactgcttactgagcgggatgatgttctgccgaacttcgtcattcttagccatcatctggcgccaggtatcgagcggttcgcctgcgcggtcgttaaccgttccggccggaccgttaaccagctcgtcagcgcgcttgacgttatccaggaatatttcaggcgtcgtcgttcccaaaggcgggttaagttcggccatgttttttgctccaaaaagaggcttcgcgcaaacgagggtttgagcgaaagataaagttgaaagggtttttttggtattaagcagcgtcgccggggtatgtggcgtcgtcgtagtcataaaattcagcacggtattgccgggccgttatctcgcaggttccatcgtcctgcggcactatctcggacacaatggcgtgatacaggtcgctctcagaactacagaaaattaaccggggaggctcaattatcggatcatccagcaggatatctgcgaattcagattgatacgggacggatacctgatagttgtcgcctgtgggtgatgcttcaaacagccgtgatgcttttccatcctgataacgcagatagacgcgtggatttgtaaaagtccagtccagcggctccgacacatcgaatgtggtcaccccaccagcagtagtcatcgactcaatcaaacacgaaatggtgttgctgccagggatatcatcggtcagcacaatacgatccccgacgttgtaacagagcgcgtccagttccgtcgtcgttttatgcgtcatacgctgcagctggtattttctcagtcggcgcataccaatctggtatgcgtgatcaggattgcctaccccatcagcccggtatgcctctattttcagcggcgttgggttgccaggcagacggcattgcaccgtctcttctgcccaggtcgatccgttgatataggttacgtcaacaccatcgtaatcatcgtcagtcaccgtaacgaaatcggtctgcatctcggataccatctcgtgaggggtgatagccccggtccagggtttaacaccttcacgacccactgatgcaacagactgggtatttagcagaaaataactctttccggctgcagcgattttctgaagcatttccagcgcagaaatactgtcacccgtggcaaaatcgaaatactcgccgttcggggtccagtaagtctgctccagggcatctattgcctcagtatccatttccataccaagagaacggccgacgtgataaagcgcaccagagatactacgggctacgccagagtcataaatgcgcgtggccacaacgtttacgcgccggtcagactgagccgccaatttgccccccgtctcaaccgtaacccccatcagggtgacgccagcataggatgtaggccgagccaacaagcgaccacgcaacgcttgccagtacatcgagtcacgcgcgttattgctaccctgctcattgcggcggcgacagcgcacctcaaccagcccaggagaagagagatcaaaacgctctgtaaaacccaacccgttgatatttttaagcgcgtaaaccccctgcctgctcgtccagccagagccagatccataaacacggtactgtatttcccactcacaatgcctgatgcgttttttgcctttgctgtcgaatccgcaaatgccagacggaaaggagaaattcacctcgaaagcgtccaccacttcagattccgggcaggcaaggaacggccccatccaggtattgttgtcgctgatccctgtagcctgatagtcaatcatcgtgcggggtgagaagccagaccaggaaggatcaaccactccctcaatcagccgctgaaccgttgcggtcgtaccgtccgcatccgcaatgcggtactcgttgccacggtgagccagcgccaggcgttgtgttccctccggtatcccggaaaatgccactccggttgcactcccatacgccagcgtaacgttagcagttattgccggactgcctccgctggacgcggtgccggaggtaaatacaggactgtcgccaaaaacggctaccgggagcgatgatgaggtaatgtttccgccgagccaggggcttgatgcctcagcaatcagcacaacaccgccactatcctgcgccagtaatcctgatccggtcaggccctcgtttatcgccatcagcaggccggacatattcacatagtccgcaatgagggaaatggtgtattcatgtccctgccaggtgatcgtaaaagtctggccagtaccggagtaatcatatgttgatggggaggcatttgctttcaggctggccgcgtttccacccgctcccggtatcgcgtcctgttttgccgtataagttgcaataaccagttcatattcagtgccgttgatttccagggtaaccggcatccccggatagggattaatttcacccagagagttactggcgagaacgctatatcccgacgaggttgaaaccagaaaattcatcggtgcgacgatcgtaacaatggccccctcaacccacgactcaggcaacgcattgccttcatcgtcatcatcgttgccatcatccagcccgttaaacgtcacggatgcgccagaaacggtcatactatcagcgttgatatctgtcgaatctggcgaggtctgcgccatatcaagcccactcccgctggaagtaccacctacctctgtcgagttgaaccagttttcacttcgccgatctcctgaaacatctgctccaggtgaataaacgttgtaactgaacgagtcccctaatgctgaaataggtgttgaacctacacggatatcaccattcgtaaacgcgaaattcccctttccaaggcaaaccatcatttcgacagtcattcgcgtcggatcatcagggttaaaccgggtcacgggttgcacaacataatcgggataaatacggcagcggccaaacacctcacgtatggggtcgccaagcttcgcctggttcgctttagccgggtttaaatccagccccagcccatttgatgatgagtagccgcctttatccatgttagacatggtgatcagcacataaacagccgatgctgcagcaatagccgctgccgcccatgccgcaatagtcgccgcagaaaccccctcacccgggatcggataaacttttacatcgctctcagcgctgataaaacataacggccattctgccggtgggaccggtttaccgttaacttcgaaggcaacacgctgcaccatatcgttacggtagttatcgacatgctggagcatccagtcatgtatggtcgtatccctgtgttcatgcgtctccagcggttcgccaggcaaacgcgacgggtaaaggcggattgtcactggtaatactccactttcagaaactgacgctcaaaacgcgccaggggaagaatggttacgttgcgccggggattgcattcaataacgtaaagcgctccctccatttcgacgacaacaccaaggtggccgatcatatttcccatatagcaggcggcaaccgcaccgttgcacggcttgcagggagtcaggtcacgcgaaaaactctcgcagacttcccccatttcggagcttccacgctctttaatcaccgcctcaaacgcgggccattcaggcagccccaggtcccggcggacctcatgtacaatgccgtagcagtcgagaacaggaaaagtgcggccgcccatctgccagcggacagccaggtatttgtcaatgttgagcataaggaacctatcgggagtaacggagcccctggaagtacgtcaacgtgtatctgtcacgtggccaggcataatcgagcatatttttaaatccggcggtgacgtttacagtaagcggagtccaggagcctcctttaaccggcatgacgtaaggcggctccgctggcgcggtaaggtcagtggaaatatatttcctgaatgtgatgctggcagtggaaatggcatcaatgaccttgcgaatagccgtggatacaacgccgtcgatgttgcacagcataaacttcaggtcctgcgtcccatcttcgtttctggctggaagggaaaggacaatggcacaggcaataaacgttacggtttcgcccccctcggtaaccgccgtaatgtcctcataaccctcacacaaataatgcgtctggccgccaatatcgatctgcaatgtaccaatgatgacctcagacccggaggacgcataaaggcggttaatcgctgtcatgtttaggccactccctgttcagagctatatcgagtaaagaactcccgacaatccactcaggatatttcccccagccaactggagcaagtggacgctctcttaactcaacagttgcagaataacgccaaagaccgggtttaataaaggtaggccccttataaatacctacaaatcggcatttaaaaaatttaaggccgacaggtgttttgcatttcatgtaaaaccatgcaacaccatcagttaatacatccctgtaccatgcttcaaatgcctgtgcttgcgcgtcagttttaaactgccagacaaccgtattatcagtcggcactgatgtatattttctacgctgcctggcaagcccccccaccctatcggttcgaatcataggatcagtcggttcaaatccataattatcgtacgtggggccggggatacaatcatgaggataataaatatcggtcattatttcttacgcctccccggataaactgatttaagtgatcgaccataattctcagttggattaataacctgggaagtaaaatattgcttaagccttttttcagatgcacgctgccgctgatccaacatttggaccattgcatcgtccggtttcccggtgtaggtgttattgaactcaacatgcagcgggtttccggcaagggaacgctgtttccgcacctgttccagagtggcatccagttttgctgatgtgcctgccgtcgtaacccgctccccttttttcagcagccaggtgcccgtttccggaattttatcaatgccgtcgtgcgccatgccagcaagggctaatcctgagatggcagcaactagaggctctgtgacaccaatagcggcagtcaaagctgcgggagccatagccgggcccacgattggaatagctgcagtggaagcatatgcagccagttgagcctgtaatgctgtagcctgtgcattagtgatcataggggctgcagctgcagcttgtgttgttttcccgacaagcagctgcaccccctgatataccagccattgtgcagcaagctgggccagggtctggatgactgttttaccaaaaccttcaaccatgttactcagggcatcgccagcatcttcagactgagttgcaagatcatataacccctgctggagattgcttgttactcctccgagcgcagtattggttgtatccgcagcgatctgattgtaattggtggccatgtcagcatagttttcccatgacgactgaacgccggccaaccagttattacgcatttcatcctgtgcagcgtaataaccctcaagtgcggaaagctctttctgatacccttcatcttccaggcttcccccctgatttttccatccctgccttaattgcgccctctctctattacgttgtgcgtccttgtcacttaacccagcactatctgtcagtgcagcagtcttttcctgcatctgagtaacatattttaacgagttatcctgaagcttattaagacgttcctgagcaacgatctgatcgccaagtttcgcattaacctcagcctgcgccagaaccttatccttgctggcgagtaaagattgttcctctttactcagcgcgcgtgttttcgacgcctcttctataaccgcgaattttgactgtaaagaccacaaatttttgcgttgctgactgatggtatcgttaagccccgtatgctgttgcagcaactttaactgcgtcatcaactgcagggtttcggcatcagtctgatcagaagaacgatcaccagcagaaactttaacgccttttggtttcggcgttttttttaaggtggcctcatattctttcttggctgcggccatattgatggcgtaatcagcctgtaggatatgtccttctttcagagctttatttaattcattctgcctggcagtatacttttcaagcgcagtctgcgatttagcataattggcttgtgcttgagcggcatatttctgtttttcagattctgcctccgcttccttttcggccgctgctgcgctggctttggcaatacctgcttgctgctgcgccatatcaagagccagtcgggccgactccctgtcattccagaaacgggctctggcttcatcgtttacatagcgatcatttttcctgagattccagatgtcatcagcctgcttaaaagctgattgcgccttgcttaccatctcccctgcggtgtcaggccgccccaaatccagagcagcatcccacatggatttaaacgcgcgtttcaacgaatcagcagagcgctcaatcgttcccatgttatcgatcaggctctgagtctgggtgttaaatcccttcgtcgccgcatcattagccgcctgaagtgcagcggcttcatctcctgaacgttgtaactgagcaacgtaatcaatctgctcggctgtcacattatgaaattgttgcgccatcgcaatcaggccggatgtcgggtcattggtcagtttcccgaacgcttccgcaaccttttcaatggggataccagatgccgtagaaaattttgcaactgactggcttagttcatcaaaacgcgcacccgcccccacgccagcattaattaatgcagtcagagaatcagtggtttgatcaaaggtgagtcctgcttgctgtcccgattttgccagtgccagcattctgtcggtagtcagaccagccgtgttgcctgatagcgtcaacgtcttattaaaatcggaaagggttgacgttccctgatagaagatatatccaattccggcacctgcggcggtcaaagctgcaaccccaacggccaacgggcttacagctccaagtaatcctcgaaatgttgggatcaggccaccaaatgagtctttaacctgaccgccttgctggagcaaaattagccatgggctctgcccaccagctaactgagttgcgacatcagtaagttgcgcaggcaacatacgcattgcattattgtattggccgattgaaataccagcacgttttgcagcacgctcctgccgcgtgaaagctgcggtgacctgcgctgtactgtcgttcgcggctctacctaacccgctcagctgcttattcagatgagcaacttcctcatcaaattttgcgctatcgccgtcaattttaacgaccagatcacccactggctgggacatagcgaactcctccaggaatgctttcggctatcgacataagttgctcgtctgaatccaactcactttctccctcacgttttgataacaaactaaaatcaagggaggtaattccgtgtttatccggatcggtaaagagactgacagcaagataactaagattggcaaaatgagagtccaggaggtcgtcgctaaaacaattatcctggtaatactcaatccattcgaaccattcagaggaagacatttccgaaagcattgcgcgccagtctggccgtccaaactccctggctaatcgcatagcaaagcgacgtgagcgggtcaggacttttccaaatctggctcttcctcttcttcagttttctcagtgtcattattaactggtgggatcatccctgaaagcatacgcacaagtaatgcagcgctgcccaataaccctggtggatattttcgtataatttcagggaaaatatctttcccttcacgttgctcttcatcagcctcgctcaaggacaatgcaacgagcatggcctgatcacgcatagtcaacaaggtggccaatttaaagttttcttcaggtgtgctttcctctgacggtaatgacttcctctcttcaaccataaattcaatatattgcattctactgtaagccgataactcaaacagtaaaatattctcaccatcgggatttaatgtgtcttttttaagataagtcatttcattacctttcgcggtgccttagcaccgctgatgaatatattaagggttagtcgatgcgttatcttcagccagagaaggtttacctttattggtgatttgtgcactacgggtaataacttcgtttcgtgaaatagtcttacccaaactatttacccagccggtgaaaacatcaactgccccatttggatatttaattttgtaagatttttcatcaccactcataaaccagtcaaccagatccttctggccagattcaccaggtttccaggcaagtgttacgctggtttgaccggctgacttaacaccctgagctgttgcatcccagtcaggcgcatcatcatcaatataggaatcatcataggactctgcggtcagttcccctggtgttaattccttaacctttgccgttcgtgtccagccgacatcacttaacggatcatcgtagggatcaccagttccggtataaatccaaaaagttgtcccggcacctttcgtcggcgtggtaggtgttggagttggcatatagtcctcacataatataagtcagggaatattggagatcggcggagccccatgtagtggcttcatcgtcacgttggtagtcgtacccggcaacgctgatggtttcaacgatactggcaagctcaggaacgtcagccatggccggatagatgcgggtttccatccatttatccagctcgctatcggtagcagttgctttaaggaatacttcaatgtgaaggacagcctcccactcttcctcatcaatactgccgcccgtcgcctttgcatcagtaagatatacagcgaccgcaggtaactcttctggagccaggaaagctggccgaccgtcataccagaatatttttccggggttgattgacttcagtttatccagaacagcttttcgtacttgcgggtgaatcattttgttaccagccttatctgatttttgatcgcagccatcatttcttttggcatatcagatgccatcagtttgggaagttcttctttgaatgcagcagtcaggggggtggccagaggtactttcaccacttctaccgggtaacgagatttactggttcgtcgaagaacatgccagcgaccattattaagctgttgcacaaaagcaccagggaagctgaaattcccaatcttcagaacgcttccagaactaccgttgtcgcgctttcgccgtgaaagttgaactcgtactggccccagctttatcgccgggaggttgccgcgatttacccggatggtagccattggttttttagggcttgcccgtttaagtttggcgcgctgcatgaccagttttcgcttaaccttagtctctttcgccacgcgcgtagagctgcggctgattgcccttccagccacccggttaatggactgggatgtcgcccgaggaatggcatttttactgatattgctcaggttctgcctgagctcttccagccctttaatcgtcacctgtgacctcctcaatccagatttgcggcttaccattaaagaggagccatcgggtaacggtgtaaacctgacttttataaataacctcatctccccgcgccgactgatagcctgcgctgaagataaccaggttaatcccatccccagcgaccggccccagctcaggcagcaggtgactttcaacagcaatatgctcatcgccattaatagtcaccgttctgcccagccttttcgccgtcagttcatccattctgtcagccatattgtcaaaggcattagccattgattttgacttccaggacggtaacgcctgccgcagcatcctcccaggcagtcccggctaacaccgcatcggtgtcatccagttgaacatttccagctttgagatataccttttccccggcggtcacggcatcagctggcagcttaggtaaaagaaagacaccttcagcgaatccgtcgcctacatcacctgcctgaatatcggtaattgcaaccgcaatcattccgcctaaagaaacgggtgtaccactgagaatttcctcggtaccagaatttttcacggggatggttttgccgtcttgcacataatttttagccataacgtctcctgtcagccccgcagggctgatttcaggtataaaaaaagcccttccgggcgtcgttttcagaactgtaatgattactggccgctggatttcaccaggccgcggtaatcaagcggcgccacaccagcatcgatacgaacttttgtagcgataccgtcagtggtaaacccttcctgttgatcaatgtaaggagtatcaacaccattcagatacgcaacttcgatggtgtccgtcccttttgccgccatcagataccaggcttttgcgtcagcttcgtcaaggcgggcctctgcaatcacatctgcaaaattctggatcgggttaataatcccggcgttaatatccgccccttttacgctcgctgatttaatcgtctggttagccagtgtctccagcgcgaccggcaccagcataaatgccgggcggatgttcagagatcgttctccctctttctgcaggcgcatcagtttacgtgcatcgtccaggctgctgacggaaatagcaccggtggacaggttcttgtggtctgcgtggaataacgccttaccatctgagagttttgggtttttggtcagaatggcgtaaacaaggtcaccgatagtcgccttagcggcacggcccattttcatcggtacatctgtgagctggttcagatcatcgttgatgattgcctggcgagtgatggaaaaaatttctccgtaggtggctagcgcgatggtttcacctttatcgccggtagtcacatacttatattcagcgccttcgcgaacctgccgcagagacgggaatccgcccatccccacacgatgcgctgtcttaaagtccgacaactggcctttctttgtccacagttcaaaggtttctgcagcttcgtcccagccctgcaaaatcgatttgttggcgacatcaagaaggatgttgccaaaatcagaggtgctgtgcgtcagcgccagccctaccatctgcatcgggttatagctggatacgccaattccccgctcagtcagggccatgcgggcatattcacgcagggtcatgccgttgtagacattgtcacgttcctgatcttcaaatccggcacgcgccatcaatgcctggcgaataccatcggcgacaaaattaccgttacctgcatgaatatgcgctggcgtggttttcgccgatggtgaagcatctttacccagcagcgccagcagtttgtctttagcctgatcgacagagcaatccatatctgctacacactgcgcctgcagttcggcgtgtttaccaccaaacatcgcaaagaggttgttaataccattaacgcgatccttttgctcagcgattacctgagcacgaatggtgttttcgtcaattacgggaggttggctcaccaccggctgctgcatttgtggttgctggggatcgcgttgcgtggtagctcgcggcggcgttaacatgttgcgaatattttttggcatcttttcgaagtcctcaatacgtttagactggatacaggccatagcctgaagagagggggtgacctggtcggcaaaacccatagcgacgcattctttgccgtccatccatgtttcatcttccagcatcgccgctatttcatcggcgctcttacccgttttctctgcataagcagggatcagaacagactcaaccttgtccagaagctctgcgtagtcacgcatatcgttggcatcaccaccagcaaagccccagggcttatggatcatcatcatggtgttttcaggcatgatgaccggattacctaccatagcaatgaccgaggccatagacgcggccagaccgtcgatatgaacggtaattgacgcaccatgatgtttaagagcattaaaaatggcgatgccgtcaaagacatcgccaccaggcgaattgatatgaagattaatatgggtcacatcaccaagcgctttaaggtcgttaacaaactgccgggcggtcacgccccagtagccgatctcgtcgtagatataaatttctacctgattgtcggcgctggcctgcatacgaaaccacgaattacttcttgcgctggctttcggacgccggggcgtccggttctttgacttcggcactggtgcctcctttatcatttgcaggatcggtgtcatacaccagtcccagttcgcggttatcatcaacttcagccttgcgacgacgtttcacatcatccggattgcgtccgctagctcgcacccagtcagattctgtcgcagcacctcctcggatttgcgctttccatgcattagcctctttaactgggtcgatccacggcatgaccggaccggaataaactgcggtgtaaagcgacgccatatccagcccacgtggtagctgaatttcgccagaagccaccgccatttttaaccagtttcggtacattggccgggtaattgctccgatgaaccagtcctggaggatcagataaccgtctgttgattcaaccaattcctggcgctgagcgctgtacgttccatcgtagtttctggctgtactggagaagctgagacgagcaccagcagcaacggcgcgcaattgcccatttctgaatgtttcaaggttagggtttggtctgtcagatttgatcatcccgatgtcttcaccgggaaggagatcatcatagataatgcctggctcaatcattacatcacgattatctttgctgttctcatccgtaaaactttgcccgtcccctttttttatgtacatccccagggcggcggctatgcgtgcggccgttaactccgcatcctcgtattctttcagcgcactgaggcgcatgagaacaccagaaaggagagacgtccctctggtttgatgaaggcgacgggtaaatttgagatgaagcatattcccggcatcaatatctttcgtatccaattgacggccggtaacaggcagacttttataaaccaggtactttttcgggcgtccccaattatcgacataaaccccctgacaaagttgctgtgactcattgttggtcatcggcacaaaatcagcctctagcgcttcaagccagaaaggtacaccagccactggatcaagtccctgcgctgagccactcaccatctgagcgaaaatttccccgtccctgagccaactcctgagcatcaaccgctcaagcatcgggcgggtaaactgtcccgtaacctcagggctgactgaccattcggcccacttcgttctgatttgttctgccagtttttttgcgatatttccgttttttagtaccgggtgtggctcaacaataattcctttagctccaactaccctttcctcgagcttatcgaatacaccaataaccagatcgtggttattgtccaaccagcgagcctgttctcgaagtgaaacagctcccatctgactaagctggttagcggaacgattttccctgcgggccttatgcgtacgagtaggcttaacagcttcatatgcctgtatcattgctctcgaacgtaacctcgcagctttccaaccaggggaaaagacaccaatcgcatcatctaacaggctcatggaaacctcgcgagcttataaccgggtcgcccgttacgctgagccagcagggaagcaagacgacgctcccattcctgacgccccttgcggatttcagacaggttctccagcgtcatctgctgcccgttgaatgttatagactttccatccagcacagctatttccgcatcggtataacgctggataatggattcaatatcggtttgtttcacacccagcctcctgatgatgtagtccacgggttgttttcgacatccgtcttatttgccttccgtttttttctgctatgggtcgtttttgctgataacgtgggtgacgcttcgccagtttccggcgtgctttcttcaatccacgttgcccgcctcgcccattcaggcgcatccggccatttgatcttttcgtatccgtgcaatatggccagcgcatcggcataaacgagtagatcgaaagcttcattcggacctcggcccggttttctccattttccatcgggtgaacgttcctcataggtcagctcatcgtaaaaccagctgccgagccatttagggaaatgcacatagttcgggccgggtgattctcgccacagggcgttattcacctgatctttcagcgcatcagtctgaagaaggtaaagcggcacatcgccagcggcttttgcccggcgagttgatctgtcagtgttatcaggaaatgttcgggtaattagttttgagcgtcggacactgtcgcccttgaagaggaaaatctttttaccaagcccatcccggcggcacttacgccagaacttataggcgttatcggtgacaccatcctcaccgccggaatcgacagccatcgccatgagccgcatgcgttttgaagggttgctcgctaagggccatgacttttcgaacacgtcagacaaaagtaaatcccagtcttccgggtaacttgccggatcgatggagtaacattcaccgtgctcatttgcccgaagagactggcgtatgttgtagcgatcgaccagccatctctcaccctgctcaccgtagccagtcacctgaaccacgaaacgacgggatttaccgccctgcacatcaacggttgcagtcataaagagcacaccatctggtacagatcgcttcggcacgtcttcagcgcgtcgttcgagcagctcactcttacgttgttcgagactggctcggggtagataaggccgaccaaagtcggtattaactaccgttttcagcgtctcttcactctgggtggactcatattcctgctcagcagtcaggaatttgtatatcatctgcgaccatgtctgatatgcagccgcaggcccctccatccagaatgaagcgatgcgtgatcgccgcggctccccaaatctgttgccatcacggtctattttttctccatcgcgtaaccagacatggcggatattcagttcacgtttcatatctgcggtgatcctgcctttgcaagccgggcactggagatatgcagactcacttgccacaacgggatcaagggaatcccggtagcccgtcatattggctacctccggctgaaaatattctccgcaatgcggacacggccagtaaaggcggcggcggtcaccacgattaaacaacgataatatgccggtagtcggcggtgcctcatgtgcggtgtttggtcgccatttcgtgtcacgaatatctcggccaggtgaactctcaaccagagtcatgccgctggacataaacgtagtggtacgtttcgaacccagggaaaatgcatcaccttctccgtcgatatcttcaggaaagcggtcatagtcagtcaacgccacgcttttatagtctgacgacgacataatgttgactgacggccagcccagtttgagatagttaccggcccggaaggtgcggtcgtgaacgttattgtcgttacgacgcggactgagtcgcgattttacttccggactacaccggaatgtgcgatcgaggcgtttcttggaatgttcacgcgctttctcttcggagacctgaataaccagcatgtcagcgggatcacaaacgatgttgtagacaatccagccatcaatcaggccaatcgttttcccggttcgggccggtccgacaaacaccaccgcatcatattcacgggatgccagacaattcatcggctcaataatataaggggccagattggggtcccatggtacggagttacccgcccccatcggcacacgcatatatgagctgaccgcatcggccacctgcatacgacgtggggcacgaagaataccggagacatcgcggcgtatccccttggcagatgcccgttttgtcatcagtcctcctctggctcatcctcctctggttcagcgtccattactttttgggcaacctgatcgcgcaggtcatcaatcacgctttgcacgcgtgataccgcaaccggcgtaagtgcacagtcgcgctcaagaatgtccggaagtgtttcaagtaccatgacgacggctttcgccatcattgaaaattcacgtgcgacgtcttcggcggggataagttgcttggtatctacttcaaatttcaaccgctcattttctgctttccagtgagcgaggcgatcagggggtgtcatctcttcaagattcgatgaggaaaccgtcgggatcattaattctgtcagaatatcggtgacaagatacaacttaagtttgctgttgcttccctgggcgggactgacattttttagcctggtagcgacggtctggcggtgtacgccagtaatcccggcaagctggttgatattgagttttaaagtagcgatttcctggtccatgatggtgaacactttttatacgattcgacatcattgaaaatccgacatctggaaaatcaataacctgtgcacatgatgatgatgactatgaaaaatgaaaactagccgttttccgcgagtccgccgccccgtggtagtccacccctccgggaggacccattaaatgataatgattaccatttgcactttaataattcatatccaccactcatggccatttagacgtccaaacatccaatttcaccatttgaaatcaaaagtgatactcattcgcattatcaagaccctcgcaatgtgaggggcttctgtaatgcgtacgtctactgtgcagatggagacagctccccttcttcaaaccatgcgtctacagctcgcccgtctgctgcacgataatgaataaggtactgattggggccatgcgtatattcatcacgagctttgatatgcccttcttcttcactgatactgacggttaccacctgaccaagttcatgtttaaagctcatcggttattacctctttttgcatataaaaaaaccccgccgaagcgaggttctcgtttgactgaaatggctatttcttgagtgcctcagcataagcctgagcgctcttttgtgatgactccattatgtcatcagtcagcgtttgctggccccatttggtgaccttaccattaacgaaagttataaccagtcgatcgttagccaattgttcgttatcaatgattgtgtagccatagagagccttattccagtatatccagcgctcacgttcctggttcacatccgtcctgcgtggtgaccccatgatctgcatgacgtcgtttttgttcattccaagagataaaagcattgatctctggttgtaatctactttctggactgttggcgcacatgcggtaattgttaaagctgaaacaccaattaatgctgcaaaaagtaactttttcacgtccctattccccatcggtttatttgggacagattaacaggggaaacaacaacaccgcaattgagccctgcattatcacaggcactcagtgaatgcctgctgtaatgccttagctcgcctgttctgcgatggtatcaaacagcgccagcgcctcagtcgcttcctggatggccttgcgggtcttcgagacaatctcactttcagtgaagacacgatcaaaagagtcagcgaatagctcagctttcagattgctatcaccaacccagtcaatggccagcttggccgctgcggtgtcgtagttaactttcttgatgatatccaggcggatttgctcggatgcggtgatctctgacatgtcttacctctgtgcgatgtggggagcattatcgaagccactcggcgaatggctcctgtaatgctttagctgcggtgctccattattaggaatgccccgctacgcttgttatatccgaaatgttacctaaactaacttatgactttgctctgccatgacaaagtctgccgttctacccgtgagcttatggatgagccactctcaagccttcctggctctcagttttattctcaaccagtagaaaataaaccaacttcgtggctacaatcagtcattggctggctgtacagcaccccgtagctttgggatttcctccacggggttttttataacacttaaggcagatgcttcggtttagcattatcgaagccccttagctcaggagcttctgtaatgcctactgctgggccctgtgttcgtaacgggaaatggtcttgccgtttgcgttcatcacataggccacctccccctgcttcaggaacacgttctggtccattccagacactgagatactctgctgattggggttgaaaccaacgctcaggccgctatggatttcttcgccgccgccaggcgacatcacttttactgtcaacatgcttcttctcctacttctggtaataaaaatgccgcacggtggcggcactgatcgaatatcaggatgttgcaaaaagtaacgctcgcttatctttgagttttcacacaaaaagtaaggagcgttttaatgtccgttgataatcagaaacttttacagaaaatcgtcgaggagctggagtcactcaaaggtgagaccgagatcttatctatcgctgtatcctgcctcttcagcgagttgccaacagatagcgccagtaacgtgagggctaaattcacaaaatccgtgaatgaactaaaaacagcggcagcagctagtcggaggaggtcgcgtcgcgacgtatattcaaaagctctgtcaatgatgaccaagcctgagtaatttcggcatcaaggttgctaaggaatacgcttctggcatcctgcgtgttcctttcctcttccggctttaatgctgccggcactgcaacagagatgttgatcggcaggttaaggcttctcagttcatccttgagcaggcgcaccttttcgatgactgaatcaatggcgttgtcatcaatttcaattacgagttttcgttctttcatagatactccgttccgggcataaaaagtcccgctattgccagtcatcacgattgaaagttgccacagagtagcgggcaatatttctccgctatactgttaaatcgccgagctcaacagaacaggaatgaaaatatgatcgatcattactatgtaactcatgctcaactcctggcgctgagaaacgttgttgcttttattgtgcaaacgatgcctgaagaacaaaaagagagtgtccttcaggttttgaaaaaatttgctgaaatagaattaatggatggtatcgacgcgccgcctacgagtgatatcaccccgaaaacagttgagaagttaaataaagcctacaaggcaatcttcactgacattatcgatctttcaacgcctggcaggaaatctgcttcagcaagctacctgcaatagctctcgaccttatctccatgatggccagaacgttctcgtctggccctttctcaagtttgctcagtcgaaattcaatattctttgccttggtcatcgcgtaaccctgccggttagttgcgggcagttagcctgcactgatttgttttgcgccaggatgtcacgcttggtctgcttatccagcacgtcgatatcgtggtcggtcaggtagatgaccctcacccagctgcaggccgtatcaacgactaccggggcgggtaaatctttcgcgcagctcgcgatcaacatcgtcatcgcccatacgcttaacgtcttcctgtacatcgcttgcctctttcacaacttccgccttacgttctgccgcggcgacggtggcggcggcgttctcttcggtacgctgctgatcggctttggcttctgccttactggtcccgcgtgaatgaccaatgccgaacgcaccagcgatagcacccaggatgacaaccaccagcccagcaataatttcaaagctcattgctgcggatccttcagttcgtcggccttctctttcaatgctggctggcgcacgtattgcgatagcacggccagcaccaccagcgccgggctaatcagtgcaacgatgtttggcggcaggatatttttgatatccggcggcagcatcgcccaggcgtgcagcgcagcatccgggaacgactgcgcccatacaccaaccagcgcgccgatagctcccagctttacagaccacgttttcagcagcaagctggcatgccctacgaactccagccgggtatatttgcgaagaagtaacagaacgagcacagccaccagcacaagcaaagcgaaaataatcatcttcacatgacacgctccttaacccagccgtagagaaaatcctcgttggcttcgcggccctccgccagttcgaggtatctggcaccctggctgcagttcagcgcacgcaacagaacctgttcaccctctttcccgcgggctgaaaggtatcccttaagcgcggtgatggttcgggggccaatggcgccatccgggatcagatcggggtatagcttcccgcgcatgttcagagcagtgagccagcgctggaaaaacttactggcgacgctgggccccatgttcacgccagtgtcgcaaagctcatccgccagtaacgtagacaaactcgctacctggtcgaaccgggggccggtccagtaatcgctcagcaggatttgctttgctgtttcccttggcaggtttcgcatatcaccggtgtagccatgtgcacgggcggtggtttgcgtgatgccccagcgggttggcccgcctttatcagaggggtgatcgacataaccaccctctttgccgaggatcccctcgataatctggtctgctgtcatggcgccttgactccggtaatgcgctcccagaaataggtcaaagcaacagaacccattgccccgctaattccggaagtggccagtatcatgtaaatgctcagtccgctttcaatgctcaccaggccagcaataacgccggtaaaccctgaaaccaccatttgggcaagagcattgatcaagctccatgttgccttgctctgcttcacatctatcaggtagcgaacaagtccaccccagcaagcaatgatcagcagagccagccaggtaattccggccatgctttctttgtcttgcatatgctttgccataggttcacctccgggttaacggggtgctgtgtgtttgaaaagggtcaggcccatcgggctgatttaacaacgagccgtatcgaagatggttcccgtgagcctgaaatgaaaaaaggccacgcgagtgcgcagcctgtgaatagttgccgctgagtggcggcttatttccctgtttgatattgttaatttgccaataaccatacaaacaaggagattaacgtgtctgactaccacaacctattgcatgtgatcaaatcgcgcgtgtgtgaaaacaggagcatgtctcactccgcgtattatccgggcagcatgcaggacaatcagatcagaaacagagcagcgctgatttatgtcctcgaaatgattctccatcaacacagacaaaaatatgccaccattttcaatccgcttgagggaaaagctgcgttgcatcacctcatctttatgaaaacaaaatggcagccgtcagaaatcagggaactgaagctggaagatgctctttttgttatccaggatgagctaaggattgagaacataagcgaagatgctcaggaggccttaagctccttcaatctgcctttagctgcttttctgtttgaggactttccagaagaggactggaactatagggaaaactcaacgttcctacgaaacctgatgatgaaagcaactcaatagacatgtcgatctcttttagccgttcttcaagagcggctttttctgccaccagacggttaaagtgggcaagatgtgttttctgctgcccaagccagtcttcaagctgttgagtggtcatgcccgggttaaaaaaatatggctgctgcatagctccccccagaaaagcaaaaaccccgccagttggcagggtttcgatgattaagctgtgtgtcgaagtgaccactcttaacacaataataggtaaaattcgtaacgaaaagctttttatgcaacttttacaactctatttcgctgcgtccagtcgtccatttctagtgtcgctcctgacatgatgatgcaggcgtcaataaatgtttctgcaatcatcagtttctgcctgattttaccctcagagcatttctcccagcgggaaattgtggatttcgaaacgtcatacatgtagtggagcataataagcttaagctcatcatggcgcccggtcttacccaacatacccactgcggtatcaacaatgatgccgtcgttatcacagcaggacgggcgggattttcccgcctgaggaatgagtcctttgaatccagcgccaaccggagaccagtcaacccgagaaccttcgttagaggcccatgccccccaacgttcaagaaccagttgaatatcacgcattgttgttatctcccgtaccgccactgatgtgcttgctttgagggctaaagtgtttgagggaagcttccagtttcatgctttcccctcagcggccacgttacccaaaaaatcaggatcgccgcctaacttggctacctcatttttaagaatgatattttcaagtatcaacgcaccaacctcattgttgagatgagagactttccgctttaactccagatattcatcggggctaatcaattcctgaagctggctttttgcaaacataaacgcttcgaacaagtccacatcaacaccgccgaacgataagggatcatcagactcctgctggctgacctgtgctttcaggcactgatagttctcgattgcttcttttaaaacttcgtttttcatactcagtacctcgtaacgttatcagcgtcccactcaatatcgagttcactttgttgtttaccgaccaggtagttaaacggccccttgtcgccttcaagaaactggtgtgaccgggcgtcaaaggtggcgccaatgtcaccaatccacccttcgccctctcgctgtttcaacaggcgtatcattgaggctggcatctgaatagcggtttgttcgtccttgtccaggctctcataccccatgcgatcagccttgcgctgcgccagctcacgcgggatattccgccatacggccataacgttgtcgggcatgtcggttaatgcgccggtgcctttaacgtccattttccccgtaggtgccgcttcgttggttttgcgggcgtgtgtgaccagaaggacatggcagttatgctcgtttttgaagtcgcacagcgtgtcgataaattctttctggccgccgtagtcttcctcgtcgagtccgcatttcgccaggttgtcgatcacaaacaggtcaatcccataccggcggcgggcgtaggcgaagatttccagcaggcgttcggccttcgcggtgccggtaagcttgaacacccacaggcgatcggagaaccactcattcgtcgtgacgatttcttcgcgtttcggcgaagcggtgcagatggtctggcgggtcaggcgggccagcattttcccaggcttcagttccagagaggcgacgcacgtccggacatcctgactcatcgcttctacggcgatatgtccaaccagttccgttttaccgtggccgttcaccccgttaaccagcgtcagctcaccggcgcggaacttgaaattgctgttcaatgatgcccaggggctggtgaacagaccggcgtcccgatgctcgaacgcatcaatggtttcctgaagcagatcgccggcggagcacagttcgtcaggatcaaagaatttcgccgtacccagacagttccagatatcatcctcgctcatcccggccatcaggcattcgttgatatctttgtgcggtagctcaaccatgcggcaacgatgctctcccaggcggcgcgcgatttctttcgcggcttcgcgccccacatcgtcgttatccaggctaagccagatttcgtcgaaccggtccaggttgtgatactcgtactcgatccactgctgtttggctcccttcccgccaccgaacggcaccgacagcgcacagatacccagttgcgagtaagtcatgcagtcgatttcaccctcgcacagcacaactgcgcgggctttggcgtccatagcctgccagccaaacagactcggctcacagtcagcctcagccataatgagctttttcccgccaggacgttcgatgccgatccgcttcacctgcagcagctcgccattgcggatgtacgggaacgccaccgccggtacttcgcggttttcatcgtggtaccagaccaccgcatcagaaacgcggaactggtcagcagtctcgcgagtaattccgcgcgaggccagatagtcgtagcaatggttcgcttttttcacgccctttttcgttggccgggagaatgtttttttcttggcctcgaagtgatgatcgtcatctttcaggcccaggaattctttagcctcccgcatggcgtcatgcaactggcagttgcgcaccagcacccataaatcgagcagatcgccgctgtcaccgctggcaaaatctgaccaggcctttttcccactcagattgatttttaggcttttccccgtatctccgttggtattacccgcgcaccactctttgccctccagatgcccgcgaggcaggaggtatttagcaaccctttcggcgttgtcccacagtttttcggatagttcagccgggcccattagatactccgtaaatcgaattttataaaacaccacgtcacgaatccttcgcgcagaaagccgcggttaaaaccggcaaccagcatgcgtttcaggatgattttcatgggcggttggctccacgcttgaggcggtcaatagcggcctgattgataaacacctctgcggagccgtcgttggattgtgtgtaccaggtattccctgcgccattgccagcgctggtcgtaatgacctctggcgctggcggttgattgggcacgcgttcaggaaagagaccctgccatccaccagcaatagagcgacggatcacctcatcggcgttctggtggccagcgagttgcttagcctggtacgtgcaggttgtttcggttagaggtttccgggtttcccgtcggaacttagcccagtcctgccagacttcgtcactgacgttttcaggttttagccttgcagggtcgaatgatgtttttttctggcgctttgcgaccgcttcttgtggttcatgatcttttacttgtggatcaggttttaaaccttgtggatcatgtcctccagattctggagggtcaaaacggttgcttttgccagattctgacgggtcaagcgcacttgagcctctcatttctgacgcgtcaggttctgactgttcaaaatccgaagcgtcagattctggagggtcaaaacggttgtttttgatacgctccagtcgaattagcgttctttgctggagtgcgatttcttccaacttctcaacattgaggtgatacatgtttgaagtgttacggttaccgtttcggcgattctctcgtcgcagccacccctccgcttcaagctcagacaatgccgttcggattgtgctttcaccggcgcctatctgacgtgatattgttttgacgccgggatagcacgtaccttcatcgctggaataatctgccaaacgcaccatgaccataaggcgtgttcctttgatgccagagacagcacaggcatcccatacatatccctgaattttgctgctcatgatgttagcctcgtgaagtactgttgaaacttccagactggctgcatgcattcatgcggataacccggtctggtgaaataaacctgctgcttatcccgattccagccggtgacatgcacaatcacaccgcgcggatcgctataatcgatatccaatggcttaacttggttttcggtagtgatcgagtgcgacatatcacactcctgatccgctgtttgaatgaatggacttaacagacttgttttttttggccttcgctggaaatggtttgctctcatatgcgctaacctttccatcatccgtcacgtgcacgacaatatttcgacctgagcgcacggctttgcttatagcaatttgagtcacacccagacgctcgccagctcgcacctggccaacttgggatgcataatctttcaaggtaaaagtcatcatattgatagcctaattaatagtatcatgggtactaaaatctatagtactatcagtaggagacattttcaaactaaaggtaataaaatacagtcatgaaaaataaaaatcgccttaccgaagaacagcagaaagacgcagagcgcctgaaggctatatatgactcaaagaaaaaaactctggggatcactcagcaggacatagcagatgagctaaacatcacgcaaagcgcagtgggtcactatctgaacgggcgaaacgcgctaaatgtaagttccgctttgatgtttgcaaaaattttagaggtccaaatcgaggagtttagcccgcacttagctaaagagctggagcttatgcatgctgcggcgcagaacatcaaatttgtgggcacttacgaaaaaaggccttcttaccctctgatcagctgggtaagtgctggtgcctgggctgaagcctgtgagccttataatattaaggatattgatgagtggcttgagtcggatatcaatgttgaaggagacggtttttggctccgtgttcaaggtgattcaatgacatcgccaacagggttaagcatcccagaaggaatggacattttggtcgatacaggaagagagcccaagaacggcagtttggttatagctaagttagatgatgcaaatgaagctacgttcaaaaaactagttattgatggcggacagaagtatctaaaaccattgaatccacagtaccccctaatgcaagtaaatggtaactgtaggattgtagnnnnnnnnnnnnnnnnnnnnnnnnnnnnnnnnnnnnnnnnnnnnnnnnnnnnnnnnnnnnnnnnnnnnnnnnnnnnnnnnnnnnnnnnnnnnnnnnnnnnnnnnnnnnnnnnnnnnnnnnnnnnnnnnnngttatagaattagtgagtattagtattgataatactagtacttaaggtactattaactcatcggcaaacaacggagccaatgagatgaatacaacctcccaaccaaacccagctagccaggcatttgatatccacgccaagctcagagcagcaaattcgcactggtcttattgccatgctgtgcagcctcacgataaaggttttgattaccaattcaatacgacatttgttggtgggatggagttcgcagtttacgaacgtgtagataatcattttgttctggttgatttcttcaagtcatatgaagaagcatgtgatgaggcgaagaatattctcgatatttatccagatgtcagagatttgatattacaagccacatctattttatgaccaaacaataaaaaataaccgtccgaaattaacttaaaaacccgaaaggataaaacggcttaattgcttaggcctcactcattttgaggaaagcgtaatgaatgttgcatcccgtaaaaaagataatcttgaaataacaatgagtactgatttccctgtactcattgaagcaagtggagcactccggacagcacagcacgcagatgcgtacgccaatcaactcagggatgagttcaatgcattgctctttgctgcgatagccagaacagataagcatgtcgctggtcgctttaccagtctgctcaatgaactttgcgttatgactgactccacagtgaataacattagaaaaggtcgctaaatatgacattcatcatcgaccacaatgcatataaaaccgccctgctttatgcatcatgcggacaggaagtgattgcgggcctttatcttcgtaaagcgtacgggaggtaattatgtgggacccggaaaaagatacctgcattgaagaggtattaactcaagccaataacctgaacgagctgctggatttaatgcatctttgctttagcaaaatgaattcatgccaaaccgaagcattaatcggccttgcaatgaatatatcgtgtgacatctttacatggattagcgaagaggcaaggcgccgtgaaaacaaatctgattgaaacgcgtcgccgtcacctcgttcgcgccaagcttgattcaatgatgcgaaggactgggagttattttcatctcgtaaaaatggacgatggaacaacgttacctgttgaacttgatgaagatattttaacaaaatcattaatcaaatttttcgaatcgatgatttatgacaaccataaacgcgagcaggcggagcatttgattgctgagcattattcgaattgcatgggcattaataagttaacacctgatggtgtggatttcatgaatgcgctcattgccacgctggccgaacagtcactaaaagcggagaaattaactaatggctaatttaccccccccattacacacgaaaaagtgcaggtcgttatgacgattgaaaacggccaggtaattgatacccgcaaagttcgcgataacgagcttatcgcgacgatggacacttttttctggatggcaaagaaagctgggtatcaggtgatcgcccctaatcaggagggagccagtggcactaacagcaatacgcattcctgagcgagtacacctgcaggcgttgcaggtcctgctgcggtaccgccggaaacgtatttatgcacggcgcatgcgccgcaccggatacctcagcctaaaggttaacccgcgctggcggctgttatcaaaagacgacggccgtaactgggtagtgatgagccattccacgtacaaccgggagatagaaagcaaatgatcgacaaagaaaaagaaaatgtgaaacagctcgttgctcgcctgaaggtaatacaggagcaatccgacgtcacgatccctgcctggatgcttgatgaaaaccgctacggcaaaggctccctgagtttagccgaacagcatgagtgggctgaatcaatcgtccattccatgcgcagcacagtagccctgctctacctcatcggatgcgaaaagcgttgggggctgcggaacggagaataccagtttaaggccggaaagaatgtcttcggcttaacgcgggaccttattgaaaatttacttatcgagcacgttgaagcagcgcttattgagttcaaccctgaagagcgctatctcgcggtgttccagttctattacgccaacgatcagatattaaaggaggatgggcattcatggtttgacgactttctggacgacatttttgtcggcctgtccatgcgacttaacgctggtgaggcattgccagtaaaaccgatagtgcattgagaggtagcgaaaatggcaatgaaaactgaactggcaactgtggcagctcgcgatctgcagattatcgagtatcgcggccagcgcgtcgtgaccactgaacaattggcggcgggatatggcacggatgaggtaaacatccgtaataacctgtcgcgaaacctggaacgttttgaggatggtaaacactacttcctcttaactggttcagaattaaaggaatttaagaacctagtaaccatgagttacttggttaataaacacacaagccaactgattctctggaccgaacgcggcgcggctcgcatgtcaaaagtcgtcgataccgatcaggcgtggggatatcacgaagacctcgtggagttttactttacccagcgtaacgctatccccgctccgtcaacccaggtcgctatcagccgtaaagaactggctttgatggtgattgaggcagaggaacgagcggaagctgccgcactggaaaacaaaacactcagcgctaccgttgaaagtcttgagaagcacttcaccaaaggcgtgaccattccagcattctgcaaagccctgaacggcgtcaacatcaacaaaatgatgtggtgggccttcgagcgtgactgggtgtttaacgaacaacgcgatccggagaaagacccgcgctggcgtgtcgcctcttatgcccgtgataagtacctgacagaagaccagacgcagatcaccccacacggcaaggacgctttcacgaagtttaccccgacgctgctggagaagggttgccatcgtctgtaccagttgtacatgaagggtgagctgccgatgaaaaagacctggaacggcgaattcatccacgacaaagccatttatacaccggaggaaaaataatgccgggatcaacctatgaagtcacttttattgccaactatccagacggcgaccgttacccgcttaaatacgaggtcgacgcctctggagttgagcaagcgattgagctggccacggctaaagccgcagatctccacatcggcaaagaaaatctgaccatcgcgtcagttgttccttacctgtgcccgctggccattgaaacaataaaccgtgacggcctgcttaaaccgtgcccgttctgcggaaacccgcacgtaagcctcgttgaaaccttgcgggaatttgatggtgaaagtacctggttcgtgaactgtggttgctgtaacgcttcgcaacagccagacagtaaagagggcgcgatctggaactggaaccaacgcgaggagccggaggttaactgtgagcaatagcgacatctggatgccagccggttctgtcgaggaggcccaccagcgggccttaacgtgggtttgcgatgcctacctgttctatctggtcagcctgcatcgccgcccggtataccgtcaccagtatggcgatatctcgcttaaccagccagcactacaagggtttattgactcctacctgaaagataagggatgggataccgaacggcgctgggcgcattacatcaacattctggacctcattaaatatatgcatcgcagcaattcggaatttatcgactggggaacagtgccagcgctgactcctcgtgggatccgctggatgaatgcgtgcctttcacgcctgggcgaaatggttaacagctatggcgggtgggatggctacattgcagcagttaaggaggtcagatccgatgaaagtcgaatttaacgatcagggcgccattgcgaccgccaccgtcaccagttcggtattcgagttccgccggcacaatcgcgctgtcgatgccgccttgtttatgtctccgggcgttctgtcgcacaacagtggtttcttcattctgaaaacggtgatttccggcaaaacgtcgcacgtgctccgtgcgtataaatcgcttcagtgggaggcaacacgatgagcagtaaactaaccagagaatggctgcaacatcaaatttccgaaattgaggttgccggtattagcgacagtaatacgctggccgcgttcaagctggcgctggccgcaatggacggcaaaccgaccgcatggaaactggaaggcggcggagccccgggccatgtaacgctcgatgagcgcgtcgcccacgcagatcctttgcgtgatgtaactccgctttatgagcatgcggagccgatagattatcccgaaactctgccctgcccggtcattctcgagcccggcttccggttcggaaaaggcgttagcactcacctggttctgcgagcacttaagaaccgcgctgaacgttacgcagagttggatgctatgggtccagaggcccgcgcagagcatgatgccgctatcgctgaactcaggcagaagctgggctttggtgctccggcgaaaacagccgtgcagattaagctgccggggctgccaaaactcggttctgacgccgaatggtatcaggggtttgccgccggcgccggaagtatgcgcgaggcatgtgcggccacgctgatttctgcgggcgttgaaattattgaggagggaaagtgatggctatctataacaacctggataaatggcgccatatgccgcagcgcgagccagacccgaaaacggtttgcaacttctgcaaacagattactgccgcggacaaactgatcgccgggcccagcgtaaacatctgctcggaatgcgtcgacctgtgcaacgaaatcattaccgatcggcaggctgagtaccgcaagaaggccatcgaagagatcgcaacggtgctttgcgtgaaggaagaaacgctgaccgctgaaagagccatcgttatggccacgagcattttcgatgtcgggtatcgcaaggaggtgaagtaatgcaagagatttacagtgaatttagacatgaaaatctcacttccgatgaggctgattttttaatgaaaaattatgaaaagcgaggcattcaggcccgtaaatcccgaagcaaagatgctatcggatggacgataaccgcccttctccaggaaaactattcccgaacaccgtcaagagtgaggaccccgaacgtctggggtaacgccaatgtagtaagggtggacggacgatccctgggcgacaaaaaaaatgggcgtaaataacaatgcacaaatcgttcgaaatgtgggtccggctgcgctacggcggccggtatgacctgacgcgagacgggcacggctactactgccgggaagtggttaagcggatgtatgagacgtggcgccactgtcgtggcctgattgtggtgtgaggtgaagatgatttatctggatgttgtgccgattacaaagtactgcgaagagatgggcgagacgctggatgccgttaacaaacggttacaacgtggagtgtggcaggaaggggttcatgttttaaaagtcgatgggtcaaaagaacgttggatcgacttaaaggagattgcaaattgggcaagacaaaacaaggatctctatctctcccaagaggtgtaaccatccgccagcataaaactggtgacactctggttatcactttcacatataaaggggttctgtgccgggagcccctctccaaactggaagcaaacgcacgcggtgtgaaatacgccgagcgcctacgcggagagatacaaaaccagatcgtcaatggcacctttgaatatgcgaaatatttccccaactccaaaaagctggagctgttcggggtagtgaagaaaaccaaaaacataaagtcttacctggacgagtacctgaaaatctgccagaaccgcaacctgtccccgtcgactatcaacggttatgaaaaatgtctgtcggcgctgtcagctctgcataaacttcacgtgtcagaattgacgccagcggtccttaaaaactggatagccagcaggaaaacaaagctgaaaacgacccggaataacctttcgtttctgcgcagcgccatagatgaagcggtgacagacggcctgctgaccattaacccggtaagcctcgtcagcgccagccggtaccacgtgatcgacagcagcccgagcgccgacgattacgaggttgacccgttcacgccagcggaaaccctcgctatttatcagagctgcaggtacccggaatgggaaaacctgttccgctttgccttcaataccggtctgcggagctccgaactatgcgcgctgcgctggcctgatctcgacaccatagggaacacagctcacgttcaagcggccagtgtcgtaggggtactcaaaggcaccaagacaaaagccggtacccgtaaggttgagctgaacagtgaggcgctggcagccctgcaggcgcagaagcaatacacctttctgaaaagtgagttcatattcagcgatccgaaaacgggagaaccctgggcaaacgccgacgcgatccgtaaaaaggcatgggtgccgaccctgacaaaagctggcgtgcgctaccgtaacccttaccagacgcggcacacattcgccaccaagcatatcagccagggtgttaacctcttctggcttgccggacagatgggccacaaagggccggaaatgttgttccgcaattatggtaaataccttgcagtatatgatggaaagacgtctataaaggtagtgtcaacctgagtaaaactgcctacgtctgaagaaaattaagaatgacgctaccattgctttttgtgaaatgagctatcatctatgtaattgatagttgcactattgcgtttacataaacgtaaattcatttaaaaacaacaagttagactatagcaataaacgcaatgtaaatatatttcttgacaatatataacacattgatttttatgatattaaaatctcattaggacagcacagggatactgatagtacttgaagagttacggtacaaactgttatcctgtgctccactaatacaagaaattttatgtttttttaattttcaatagcttaacgtaggtactggcgcagtattacaactggagtgaccactatgaaaaacacactaactgtaggttttggtgaaggttaactacgacctaaatttgtaacacaaacctccattagcacaataaggcctcccttgcggaggtcttttgttataggaatcaataagatggcgagaacacttgtaaacgtcagcgctacaatttttgctctcatgttgattgtcagagcactatttacttatatctaccctggaaaactcccctttaacctggcaatcattgattggctggtcgtcattgctggatctggcgctgccatttcttctatcttctgctttatcaaaaagcgctacccagacactgcagaatttcttccaatgttcagtactgtttgttatgtgatagtcctgatcgggtatgcaatcctgagatacactccggcttatcaaacatctctttcgattatggttacaggtatgctcgttgggatggggtggtggatccagtgtataacgtcagcagcgaatacgcgcaggtcacatacccttaacatgatcattaacacacgcaccagtcccgaataccaaaaacagttacggaacagcacaaaattttaccggggtatgcgttatgtgccacaagaactctctgagtggcgctgcaacccggataaagaagaatacaagaacatgaaggtacccgacgagtatagagatgccattaacggccttctgtacattcttaattatttcgagtttcttgcgcagggaatcaagttcaaggatttggatgacgagttgctgaaggagtgtttttccagcttcttacgcggaatagaacgccgtggattccacatgattttagaatctcagaaacaggatccagcggcctttgaaggaattatttatctttcaaaaaaatggaacggaacctcgtttgttgaaacccatcgttcaaacccaaacacagtagaactcggggttccatatccttcaaacgaaactgtcgaaaaaatggttcaaggtcagccgttaattgatagcgacacgggtccagagcttcaagtggccacttaacattgatgcatggacttggagcggacaacaaaatgcacttaaaatgcacgcgctgggaaaaaaaatacacataacaatatttttcagcaagttatatcgttttcggacgcgagttcaactcccgccagctccaccaaaattctccatcggtgattaccagagtcatccgatgaagtcctgaaagcccgcacggcgcaagccctgcgggcttttttgtgccctcaatttgccccacgacgtccgaagagaactcattaaatccgcaccttttaggcccattgatgggcccaacgaaaagctctattgttttcgttgggcctaaacgcatggagactccccatggcaagaaaaaccaagcctttaaccgatacggaaatcaaagccgccaaacctaaagatgccgattaccagctgtatgatggtgatgggcttactctgctaatcaagtccagcggtagtaagctctggcagttccgttactatcgacctctgacaaagcagcgaactaagcagagctttggagcctaccctgccgtctcactttctgatgcgcgtaaactaagagctgaatctcgagttttattagcaaaagacattgatcctcaggagcatcagaaagaacaggtgaggaattctcaagaagctaaaaccaacaccttcttattagttgccgagcgttggtggaatgtgaagaaaaccagcgtaacagaggactatgccgacgatatctggcgctctcttgagagagatgttttcccggcaatcggtgatatcagtgtcactgagattaaggctcatactctggttaaagcagttcagccggttcaggccagaggtgcattagagactgttcgccgcctttgtcagcgtattaacgaagtcatgatttatgcgcagaacacaggcttgattgatgcagttcccagcgtaaacatcgggaaagcgttcgagaaaccgcagaagaaaaacatgcctagtatccgcccggatcaactcccacaactaatgcagactatacgcatggcgagtatcagcctgtccacacgatgcctgttcatgtggcagcttctcaccattacccgccctgccgaagccgctgaagctcgatgggatgagatcgattttgatgctagcgaatggaaaattcctgctgctcgaatgaagatgaatcgggaccatacggttccattacctgatggagctatcgctattctggaaatgatgaagtctctcagtggtggccgagaatttatctttcccagtcgcatcaaaccaacccagccgatgaacagccaaacagtgaatgcagcactcaagcgtgctggtttagggggcgttctcgtttcccatggtttgcgttctatcgcaagtacagctctcaatgagcaagggtttccgcctgatgttattgaggcagcattggctcatatagacaaaaatgaggtacgacgagcttataatcgaagcgattatcttgagcaacgacgtccaatgatgcaatggtgggctgattttgttagcaaggccgatagcgggagcattgttgaaagcgggaaaacggggttaaaacttgtgggctgagttttgaactggactggtgctttccccgcaaaggtgcattggctcaaaccagacctggagtaatcgtagatagatcgcaatcgaatctgacagtctggtttgtgccaaaactagactttacaagacagcgcaaggggatattacgaacagtaaagatatactgagaagtcatagcaacacagaaaatgccgagactactcagcgtacattcagggcataaaatctggaaaaaagccgttctaggcaacggcttaggattttaataaaacttcaaacgttagataaatgtaggaaggttgccaagattgtcatgtttagtcttgtttggatcggtagtaatgaaatcatcagtcataacttcaacctttgcccctacagaccatgattttttttctttgttgtaagtaattgttttgaattctgctttcccttttctgatcagttcaccaacgaatgcacgcgaattaacagtgccaggtccgatcttcttacctaggttctcatgaatttttacgaactcaatatgctgattgttgctgtccattttgattgctgaaatgtagaaatcttccattgctattttctccagaggcagatgcccagcgcagctgctttcatttatatccgtgcttatcagcctcatttcaatgggtagaacaaaaaatttctctattgatttgatctaaacaaaccagtttccctaagtctatttttcgctcgtagcagaccttcagcttagttacctagtccgctcagtgccagaagcggacgctttctctcagcctgaatctgatcaaatgccagaggttatattttgtgcgctgcaaaacggctttctggtaatccggcaaaaaaaggtgaccgaatgctgaaaagcgcaccgtcataagcggttggctctgcgagtcctacccgggcactggtacatgaaagtgtgtggagtgacgaaccaccaagcaccgggcaggttgtctggagggctggagcagaaagaatgctgtgtatttctcccaccggactgtatcggacaacccaactgccgccccattctgcgttccacagatagccctgctcatcaatgcaggaaccatcaggcgcgccgccgtcttcgattttggtgaacacgcgctggttttgcagcgaggggtaatcgcagcacataatccgaccctgcatcgagtcacagtaatagaacgtgccaccatcggggctgaaacagatgctgttcggtatagcgacatcgggcgatgcaaacgtctcagcagtcagcgttgccgcattgagtcgatgaaacttaccgatgactttaacgggataatcgtcatccatcgtcccgaagacaaaattaccggcacggtcgcaccgtccatcacccatacgggtgccggtgtctcccagtgaagcagccactggggtaattaatccgctgttgagatcatagaaagccagccttgtcgtgaatcccatcagcagaatgtgatcctgttcagttagggcaaaggagccaagacgttcaggcagcgaccagcgcatcacagtatcaataccttcttctatggcgagaagttcactggcttcaatacaaaaaacgatagttttatccatcgggttggtgcgttttaagtagtcggtgatggtttgcgctaccagcatggtgcgctcatcaatgaccatggtgcggtcaaagtctttctgattataaatacggtcttcaatcagctcaccgtgcttatccacctgccctttggtcggacgccagccttgtaaatccacgtcaatgtccacgcgcaccactttgtagggtgccaggaaaccatcttcgatgccttctttcagggaataggtatagaccggttctccgaagtagtcagtactggaaacttcttcggtttctttcggcgtggcggtgaggccaatctgcgtggcactgctgaagtattcgaggatttcacgccaggcgctatcctccgacgcgctgccacggtggcattcgtcgataacaatcaggtcaaagaaatcaggcgcaacttgtttaaacgctttctgatgttcttccggcccggtgatggcctgatacaacgctagttggatttcgtatgccgggtcgatattgcgcccggtaatttttgtcatcgcgctgccaaagggttggaagtcgttggtttttgtttgatcaaccaggatattgcggtcagcgaggaacagaatgcgtttcttgtttttggctttccataaacgccagataatctggaaagcagtgtaggttttccctgttccggtagccatgaccagcaatacacgtttttacccggcagatacggcttctatcgttttattgattgcctgtaactgatagtagcgaggggactttcctgagttatcatcatagtaatcctggctgatgactggcatttgttcggtagtaaaacctttccaggaacagtatttatcccaaagttgttcaggaccagggaaatcttctagcttaatctcagattcaagctgcacaggattagttttatcatggaagataaagccatcaccgttggaggcaaaaacaaacggcacatcaagcaaacgcgcgtaatccagcccttgctgcatccctttgccaatctcatgcttattggcttttgcttcaataacagcaagcggtaaccctggtttgtggtaaagcacaatatcggctgacttcactgtcaggcgtgccgccagtttgccgcgtacaaccactttgccatcgcggagttttacctcctggcgtatctgcgtcattacatcccaacccgcctctttgattgcaggcagaatgaattttgtgatgatgtccgtttctgtcagatgtattttgctaacgccagccataacagagttcccaacgatggtgtgtgtctcagattaacttacaaagatgttccaaatcatgacttaaaactaggttttaatccataaaccgacacagcatgtgcctttcacgaaaaaaaattgtgatgaaaaaacatctcagcgttcacaggcagcgcagcacgccgcctgacaccgaacgctttagacgatcatgagcccatctttatcattttttctttaagcttttcgccaatttccgttgcagttggctctgcatcaggatcttgagtaaaaatttcagccagcacggtgatgtaagcctcccccagaccaacggtgattgcgctggcagtggctgctgatattgccccaccagcaaccgttccgactcccgggaaaaacttcagaatattaacaacaacggtgcggcctaaaaacgtcgcgccccgacgccgatcgccgatgccaccagcgtggtaagggttccctttgatagctcaaggccaaatacggatgtaatacccgcaatcataccaacctgaataggtgcaaggatgacagcgtcagaaaaagggatcggactcgcgcccgctgcggctgcggccgtcgcggaagccgctacaattttatgcgactgtgtcttcctatagttaatattggccctttgcgctgcagccaacgctctacgctttccctcagggataacctctgatgtcagttctatcaggctttctaatcccattgattttaggacgtaaccatcatccatctcttcctgaatcgcacggactcgaattacatttttggattcaggaagcaagcgctgaacttcgtttttgaaaccattgtcacttctcgccttggtgaccacacaaatcaccggcatatgacgagccagcatagtgtgtaaatcaatctctgcctgctcgaccctacgcccgtcttcttgtatgcaaagccatgcgacatgaatatggcgatttgaatctctgtcagacgagcgttctgttatcagtttttcaagatcagcatgagtctccttgaactgagacatttccagaccacgggtatcaaaaatagtgagtggtacaccctctttcgtaatctcacgcgtattttgagtcactggttttccctggcccgtttcggccattttctgctggaataccgcgttgattaatgtgctcttccctaccccagaacggccagcaatcagtatcgaaatattgccccgctccgtggtggccttttgaatagcgtcctttatgatatcgtcaatattatccattacgtttcctgttatgaaatcgagttcaggcaccagagcaatccggggaatgagtgatatttctggcattaatttgcattaagttactgatggagcctgacagaccattccgcaacaaggcggtctgtccgacatgaattttcagagaaatcagtattgcgttattcgcaattatttacaacgcgttacaggttacttccgttgattgccaaaagaaaggttggctgcacccgcactcaacaataaacaaaagtacggttgcagaagcagtcattgcttacattcagaaagcagcctgttagtactttcccctgcggcgataagccttgcttttaaaatgcgcctcgaggcctctgctactaagggaagcgctctcatatagccgttttaattgaccattgtgtcagggtgataccgtacacgtcctggagaagtcaaggtaacttcttcagaatccccatcagcaagagagctgcttgatcgctctcgcgttttaaccaacgtcatgcttgataaaccggacgatgccgctccaaattacgttttgcttcttatccaatccgaacagttgaagatgcttaacgacgcctttgaggcagaggaagtgcagagaatgacaggcgacccgaactaatccggtttccgagccccgcatactgtggactggcaagatatgccatcaccaatacaacggggcccgatgtggtgcccggaagagcttacatcaccccctttccgggcataagtgaagagagtgttgcagatgcgatttctctaatctcaatttcagtgtcatttgaaagatcgcgggcaagcaattcgatttgctcgagtgtcatgaaccgcgtgttaagaagtgctgtagcagcatatcgaataccggatgactcatctttgaggaaaggtataagcgtcataacagcttctgggtgcaaggtaacttcagtaataatctgtcgtaacagcgtgggtttgcaaacgccatccctgatccatttggaaatgtttctctgtaattcggcagatccatcgagcatattcttgagtgccttctcaccattcccacgaatttttgttcgtttttcctgcaccatctcaagaataagtgccagattagcgtcgcccttatccttgaccaaaataccagacaaggcatcacgagggctgtccgggataacaccaccattctctggatagggtttctcccgcagcttccagtcttcatatatgagacgaatatcctgagataattcatcagactggggaagcctggctgcaaatgaggccgccggaagtgctacatccagcatttcactccgtaaccccagttttgcaatactttcatgtcgtgaattgaaaggttcggtaagggcctcaaacaagtgtgaagcaccctgctcaggcatagaggtttccagtcgttgcaggagtaattgctgccaatcctggtccggcatatccgtaataaaccgggtacctataaacaaagctgttccctctccttgcataaggatgcgtttaattccgtctatgacttttggatgtgttttgtgctgataaagaacagtggcggctaaaacactgtagaactgactggcgtgcagaattgttgaaattaaatcatcgaaatcgtctggatcgatatcgaccctttctggagacatgtctgcatcgacagcaggaagcctgccaaaggctgaaaccagtacaagcgtttttccctcgcactgcctttttaaactggcagcctgctgtctgagtttatctggttcaaggcctgaagctttagctatctggtacaaaaacttgcttctatcaatatctttatccgttgtttcaagatgtagcaggtcttccaggctgaggtgatgaaagcgacttatattcaaaaacgcgccgagctcaagcatgtgttcaggtaaaatctcatccaaaacctgatggttatcgtttccagccagcacagagaggagaccgatgcaattcacatcaatttcagcgtaaacgctataaaaatctttctctcttcccggatagcgagtgacttcatccggtaactcaatacctgcttttgcatagcattccattaacccaacaaaacagctggcggacacccctcgtcctttatctacgatggcgtcaagtgtactaagcccgacctcctcagggttttggaggataatttttgcagcgccaagaatgatacaatcctgcactttcctcccgcctatgaaatcaaacagagaatgtttttcccttagctgctttggccactttgacttaatactattcaatgcaattattgcatcctggtagctaacctctgaggggctaccagagagaatacatgcccaggaaaccagccaaagccagccatcatgagaatgaaggttcgctctcaccttttcccttacaacatcccagctatacgttgacacctggcaaagggcgtctcctgccgaatacatgcttgaggatgacgataaggcattccagcagcagtcggcaaagatgcataatgagtcatccgtaacaggccttcctgcttcaataatcaagtccagaacctttaccagctctttcgttgatgtcgtttttccctggagcattaattcgcgccaagcatccagaatgtcttctatcagcccaaggtggcttgcaaaagagagcagttcgctactggcatctctttgaatcacgttaatgagcaagtttcgttttaggttttgcggttgctgttcgataaagacagcggcgctatactctgcaaaggttttatgaatgaaggttactgcttcttgattaagcgtgtgtatgcgctcgatgacgcctacgctttcccagaaatcaaaacatgccttaaccttattactgcaagcaagatagctgcctggcatttctttttgccattcagatacacagtgtcggaatgtttcttcaaagggttcagtaccgtgctcaaacagtatccagcctaacaaagagatgaaccactttcgctctggttcacttggtccaatcacttcagaacgtacagaggggtatgccgtttccagcaatctgaataactgtcgataaagagaaattcgagagctttctggctcaatacctctggaagataaggatgcgagcatggttaaaatcaatggacttctcgatgcaacacccttgagatgcaaggatttcagttgctcttttgcgacatcgaaagtgtgccgtcgaacctccgggctttcgaaaggtaaggcttccatcacttgtattagtgcgtcgtcagcctgagactcctccagaggaagaagctcataatgtttccagtttcccagctgacctggtcggtagcctacaggccgactggtgagtaataccctcgcgtcaggatgggcaactgcaaatttgtgaatggcatcagtaacgaggttttggctgaccccacattcatcgaggccatcacataaaatgactgcatcctgcaggtcaggtgatttgtatttcaatccagagctgctaagcgctacatcgataagggcctcttcaaaacggatgcctttatgattgataagcgagacaacctgacgcagtcgtgccagcaataccaaatggccttcagctgcatatgttaatgctatgcggcgaagcagtaatgattttccaatccctggcccaccaatgataatgcccctggtaacatatctgccaagggtatgagcatcaaacttgttgatgtcactcctgcgctttgctgaatattggtgatagctgttaagcgctttggataagtcatcaggaaactgctctagatctttaatgacagaggctttgagtgggatccaacatttctgtagtgaaaccggttttgcctgccccgggattgtaaactgagaataacttttctcaagccaatcacaaacggctgctcttagttgaataccgctttctgtggtatccattttgatgccgataccaacgtttctgaagtcatgaagcaacgaggttactgttgcgcgacctcttattctgatgagttttcgcgcgcgttcaaccagaactgaccacgctcgacgtggttcattgaataaacgccccagcaggctaatggcattgacctcagcactatcatttccgtctacagcatctaccgtgacaattcgaagggaacgacacacccgggataactccgggaattcaaggccaacgttcttgatgaaatcatcacctatttcgtggaggccatcaattctcccggtcccaatacgaacaatattatcagccagattcgagcggatggtcgtactgctgttggggcaaacaaccaaaattccacaagcaatgctcttgtcgttaatgcctgttgccagcgcgcaaagtgcatcccataaatcactgccacgcttcaggcctcgcttgacctgaacctccaccgattttcccgtgttcgtttttaatgaaatatcatcaccgggcccccccgtctcagcatcaatcaaaaccggtacaccattgaaaacatcctcaatccagctgactttctgttccagaaggagagacgtcatagcaatagctgcaacacgagcctggtaatctaatcccctttcagccgcgcttcctccgactgctgactttttactgttttgttcatcatttttttcaggttgaacggaattgggcaactggggttgagccaccgtctttttcattacagttcctttaaatcggttacggtataaatgaagatgcaattacagtacaagatatcaccacgataaattacctgtgcagcaatgcaacaggcacattaaaaaacggttgtgtcctatgtacgcccttacctttgctgtctattcccgtctcgagcaaataaaccaagaactggtttatatggatggggagagggtcgatcaccaccacgaaatccagatcggagtattgatcaaacccgccatggataaacgagccgccggcgagaagggagtggatccgcgaatcagactgtaatttaagcttcagttgctctgcaaaacttctgtgtaaatcgggtagcgtattaagcatactttttcctgttcacaaaaaagacaaagcattacagaatatcgagcgattcatcagcagaccagatatttctgctggaaccctaccctccatcgcgaagcgctaaatgcaagcaatactcccctcaaaccacctcgctcatccactcagcaaacgcccgcacggcgggagagagaaagcgctggtgcggatagagcaatgtgacgggtagcgggggcggctgccagtccgtcagcacttccaccagtctcccctcctgcaggtggtcagcaacgatattctccgccagctgcgccagcccaaatcctgccaggcacatttttatatagagccccgtttcattcaccgcggcgttgccgctgacgggtacagaaaaggtctcgccatggcgaacgaagcggaactcatcggcccgcctcgcctgaccggagaaataatgcacagcccggtgctgagagagcgcctccggtgacggcggcacgccatattcccgaagatagtccggtgacgcgcaggtgacccagcgaaagcggcccagagggcgggccaccaggctggagttgttcagctctcccgttcgtatcacgcagtcgacgccttcctgaatgagatcgacctggcgatcgctgacgccgatcatcaggtagatatcgggatagcgccggtaaaagtccggcagatgcggcatgacgatgaaatgcgcgatgcccgcgggcatatcaacccgcaggcgcccctgaggccgcgcgacagactcgctcagggtggattcactatgttcgatgagggcgagaatttcccggcactgcgccagatactgcatcccttccggggtaaggctcacccgccttgtggtccggttcagcagccgcaccttcaggtatttctcaaggtttttaatggtactggtgacagtggaggccggcagggaaagggtttccgcggcacgcacgaagcttcctgcctccgcgacgcgcataaacatctgcatagcctgaatacgatccaccttctttctctcctgtagcgagcagcttaccgacagacggcatgattattcgtggattatgaataatgaaaacaatttacgcacctttttacgcttaatcgcctggcgtatcgttgcacggtggattacgaaagagggcccgaaaatgaacatggcctcaataaatatccagataatcattacgttaaatagcatgcacaaaggaaaaaccatgtccgttcagcctgtcgaaataagtaaggcctatcgtttattgcaggtcgggtccaccaccatgatttccgcaaaatatgatggcgtcgaaaatgtcatgtcagccgcctgggttgggctggcaggcgagcgaaaagtggtggcctatattggcacccaggctttcactcgtcagctggtggaaaagagcggctatttcgtggtgcagatccccgtagtcagccagatggcaaccgtcctctacgctggcgggcgcagctatgccgacgcgccggataaaaatgacaccatccccttcttttatcagccggaatttgatcttcctcttgtggcaggctgtgcgggctggctggtgtgcaaagtgatgccctacccggacattcagcagcaacacaatctgtttatgggcgatatcgtcgccgcctggagcgatgaccgggtattccgcaacggacactggatttttgatgatgcgccggacgagctacggaccgttcactatgtcgcaggcgggcagttctatgccatcggcaaaggcagcaaattcgatcatgggccgggccaggactgaccctccccggtcatgcggatcgctgacgagatgtctgcgcaacagagcggctgatactccggcgccagacgccgggcgcctggccgtactggcgcttgaagctgcggttgaaggactgctgggagtcaaagccgagggcaatcgccacgttcaggatcggctcgttgctgtgggccaagcgttcgatcgacttttgcagctttttcgcccgaatatattctccgaggggatgcccggtatgttctttgaagatccgctgcaggtgccacttcgaatagccggctcgtcgggcaacggtgtcaatatccagacggctatcaagatggttgtcgatccagtcgatcagatcctgaatgatggcgccagtgttcatcatgttaccccctcgcggccggttaaaagcatctttgtcagttgcatttaaaggtggcctgtttttacacaaaatgcaagttttattgttacatttaaatccacgccgggatcgcggttttttatctccccctggaccgcacataaagtgcaacaattattcttgcacttagttaagtgccttcctacaatcgccgcgatagtgtattcgaaattgttacagttttgtggcgatgatcgacacaaatggccttaagccagcccggacaaaggaagtggcgcggcttctcacgctgcgtcttgcccggcggctacatttaccggaataaaaataatgagcctgcaaaaaacctggggaaacattcacctgaccgcgctcggcgcgatgatgctctcctttctgctcgtcggctgcgacgacagcgtcgcgcagaatgctgcgcctcccgccccgacggtcagcgccgctaaggtgctggtgaagtcgatcagtcagtgggatagttttaacggtcgcattgaagcggtggagagcgttcagcttcgccctcgcgtctcgggatacattgataaagtgaattacaccgacggccaggaggtgaaaaagggccaggtgctgttcacgatagatgacagaacctatcgcgccgcgctggagcaggcgcaggcggcgttggcaagagccaaaacgcaggccagcctggcgcaaagcgaggcgaaccgcaccgataaattagtccataccaacctcgtctcccgtgaagagtgggagcagcgccggtcagccgcggttcaggcgcaggccgacattcgcgccgcgcaggcggcggtggatgccgcgcagcttaacctcgacttcaccaaagtgaccgcccctattgacggccgcgccagccgggcgctgatcaccagcggtaacctggtcaccgcgggcgacaccgccagcgtgctcaccaccctggtctcgcagaagacggtgtacgtctactttgacgtcgacgagtcaacctacctccactatcaaaacctcgcccgccgcgggcaaggcgcgtccagcgataatcaggcgctcccggtggagattggcctggttggcgaggagggttacccccaccagggcaaagtggattttctcgataatcagttaacgccgagtaccggcaccatccgcatgcgtgcgctgctggataactcgcagcgtctgttcacaccggggctgtttgcccgcgtgcgtctgccgggcagcgcagagttcaaagccacgctgatcgacgacaaagcggtactgaccgatcaggatcgtaaatacgtctatatcgttgataaagatggtaaagcacagcgccgcgacattaccccagggcggctggcagacggtttacgcatcgttcagaaggggttgaatcctggggatagcgtcatcgtcgacggcttacaaaaagtgtttatgccgggtatgccggttaacgccaaaaccgttgccatgacctccagcgccacccttaactgatccctaatcagagaatccaagacatggacttttcccgcttttttatcgacaggccgattttcgccgcggtgctgtcgattttaatttttatcaccgggttaatcgctatcccgctgctgccggtgagcgaatatccggatgtcgtcccgccgagcgtccaggtgcgcgcggagtatcccggcgccaacccgaaagtgattgccgagaccgtggcgacgccgctggaggaagcgatcaacggcgttgaaaacatgatgtacatgaaatcggtcgccggctccgacggcgtgctggtcaccaccgtcaccttccgcccgggtaccgacccggatcaggcgcaggttcaggtgcagaaccgcgtcgcgcaggcggaagcgcgtctgccggaggatgtacgccgtctggggatcaccacccagaagcagtctccgacgctgaccctggtggtgcatctgttttcgccaaacggtaagtacgactcgctgtatatgcgcaactacgccacgctgaaagtgaaggatgagctggcgcgcctgcccggcgtcggccagatccagatttttggctccggtgaatatgcgatgcgcgtctggctggatcccaataaggtcgcggcccgcggtctgacggcctcggatgtggtgacggcgatgcaggagcaaaacgtccaggtgtctgccggacagcttggcgccgagccgctgccgcaggagagcgatttcctgatctccattaacgcccagggccgtctgcataccgaagaagagtttggcaatatcattctgaaaacggcgcaggatggctcgctggtccgcctgcgcgacgtggcgcgcatcgagatgggttccggtagctatgcgctgcgctcccagctcaacaataaggatgcggtcgggatcggtatcttccagtcacccggcgctaacgccatcgatctgtcgaacgcggtacgcgccaaaatggccgagctggccacccgcttcccggaagatatgcaatgggcggcgccgtacgacccgacggttttcgtccgcgactccatccgcgcggtggtgcagacgctgctggaggcggtagtgctggtggtgctggtagtgatcctgttcctgcagacctggcgcgcgtcgattatcccgctgatcgcggtgccggtatcggtggtgggtaccttcagcattctctatctgctgggcttctcgctgaataccctgagcctgttcgggctggtactggctatcggtatcgtggtggacgacgccatcgtggtggtggagaacgtcgagcgtaatatcgaagaggggcttgcgccgcttgccgcggcgcatcaggcgatgcgtgaggtctccgggccgattatcgccattgcgctggtgctgtgtgcggtgttcgtgccgatggcgtttctctccggggtcaccggccagttctacaaacagttcgcggtgaccatcgccatctcgacggtgatctcggccatcaactcgctgacgctctccccggcgctggcggccctgctgttaaagccgcacggcgcgaagaaagacctccctacccggctgatcgatcgtctgtttggctggattttccgtccgtttaaccgctttttcctgcgcagctcgaacggctatcaggggctggtgagcaaaaccctcggacgccgtggcgcggtgtttgcggtgtatctgctgctgctctgcgccgctggggtgatgtttaaagtcgtcccgggcgggtttattcccacccaggataagctgtatctcattggcggcgtgaagatgccggaagggtcgtcgctggcgcgcaccgacgcggtgatccgcaaaatgagcgagatcgggatgaataccgaaggggtcgactatgcggtcgctttcccggggcttaacgcgctgcagttcaccaacacgccgaataccgggacggtcttttttggcctgaaaccgttcgaccagcgcaaacacacggcggcggaaattaacgcggagatcaacgccaaaatcgcgcaaatccagcagggctttggcttctccatcctgccgccgccgattttaggactgggtcagggttccggctactccctgtacatccaggatcgcggtgggctgggctatggcgcgctgcaaagcgcggtgaatgcgatgtctggggcgattatgcagacgccggggatgcacttcccgatctcgacttaccaggctaacgtgccgcagctggacgtgcaggtcgatcgcgataaggcgaaagcgcagggggtatcgctaaccgagctattcggtacgctgcagacctatctcggctcgtcttatgtcaatgactttaaccagttcgggcgtacctggcgcgtgatggcccaggctgacggaccataccgcgagagcgtggaagatatcgccaatctgcgcacccgtaataatcagggcgaaatggtgccgatcggcagtatggtgaatatcagtaccacctacgggccggatccggtgatccgctacaacggttatccggcggcggacctgattggcgatgccgatccgcgggtcctctcttcttcgcaggcgatgacgcatctggaggagctgtcgaagcagatcctgccgaatgggatgaatattgagtggacggatctcagcttccagcaggccacccagggcaacacggcgctgatcgtcttcccggtggcggtgctgctggcgttcctcgtgctggccgcgctgtatgaaagctggaccctgccgctggcagtgatccttatcgtgccgatgacgatgctctccgcgctgtttggtgtctggctgaccgggggcgataacaacgtcttcgtgcaggtggggctggtggtcctgatgggtctggcctgtaaaaacgccattctgatcgtcgagtttgcccgcgagctggagatccaggggaaaggcatcatggaagccgcgctggaggcatgccgcctgcgtctgcgcccgatcgtgatgacctccatcgcctttatcgccgggaccattccgctgatcctcggccacggcgcgggggcggaagtccgcggcgtcaccgggatcacggtgttctccgggatgctgggcgtgacgctcttcggtctgttcctgacgccggtgttttacgtgacgctgcgaaaactggtgacccgcaggaagccggtccaggaggatctgcccgcctagcctgcagcagataacaaaaaaaccgccttcacaagttgaaggcggttttttttcgtcaccagaaaacgattaatgcgcttttttaaagcgggcgatcatttccggcaccgggtcgcagccgctggtatcggcgtttttgaccgcctccagcgcgctggccacggtatggcgagcgaggacgtttaacgaagcctgctctgcttcgtcggcaaccgatttgaagtaccagcaggcgttggcgctgaccacgcagcgggccgggacgtcaggacgcgacgcccacagttttttatcttcgataaccgaaagatagatatcacgcagggtgatcttgtccgccggacggccaagatgaattgagccgttgcggccaagcgtggagacgataatgccgtcacgagttagcggaaccattagtttacggataaagctcgggttcgcttccaggccgtaggccagaatcgcactcgtcgaacgttcacccatctgctccgccattgctacgctgagaaccatctgcaaagctgtcgggaagcggtaatctaacatggcagtgtcctgggttgcggtgaatcttgttctttttggcaccgcagaggtgaataatcaatgaacaacaatataacaaatacgggaatttttttgaagcaatctgcggttagcctgcgaagtaaattttctgatttcacgggcaaaggcggggcaaacacagattccccttcgtaccgttttatttaacgcaaacgccatcctttgttccgctagccgcgccctgtcgccccgcgacctgtccacaccagcggcgcctaaccctgtggataacctggaggcagttgcctggcagccgcagcccgggcgggctaccggcagccgttcgttttttgaacagggaaaactcccccgccgggcagcgcgctaagcgcgaaaatcaccaccccggcacagggaagcgcccgccccgcttaataattccacttcggccgcgccaccgtgtttttcttcagcaggtcgcggaacgctttcaggtagggctcattgctgcgcccgcgcttacagatggccgagaacggcgactgaaagccaaactcgttgggcagcagcacccgcaggcggttctctttgatccacggccaggcgtaatgctccggcagatagccaatatatttccccgagaggatcagcagcagctgggcgtcgacggtctcgacggtggcgctccctttgctgaagccccgacggcggagatcgctggtgttccagtagctgcgggtcaccagcgggcactggctgatctgctctttatcgagctggcggctgaagaacatcgggtgcagatcgctgcagtagagccagtgctgttcacggtacagcggctcgctgatgatgttatgcacctgcgagttgtagctgccgatagccaggtcgatatggttgttcagcacgccgttcagttgctccgccggggtgcggataatcagtttgatatgcacatggggaaatttgtcgctgaagctgcgcagaaccaccggcagcgagagcgccgtttcggtctcgatggagtcgagcgtcgagatgcacagggtgccgctgtgctcccctttgagcagcgccgactgccgctccagctcattgagttcgctcagtacgcggatcgcctgctgtaaaaactgctgacctttctcggtcagagaaaagccgccgcgcccgcgctggcagagggtgaagccgagctgtccctccagctgcgacatggcattgctgatggcggagaccgaaatacccagctcctgctgggcccggctgtagctctccaggcgggccaccgcctcgaaaacctgcagctggcgaatattgaggctggcgtcgtgatgcatcgtatttagttcaccaataaatgaactgagtatttacgccagacgatgtaaagtccagcgcgggttgcgcactatctctcctgttacgtttcatccgtcagattcaggagcagacatggataacctctttcaccaaccgcagggtggcaatgagatgccacgcttcgccggacgcgccacaatgatgcgcctgccgtttatcgaagatttacagggacttgacgcggcatttgtcggcattccgctggatatcggcacctcgcagcgctcgggcacgcgctacggaccacgctatattcgcgccgaatcggtgatgatccgtccgtacaatatggcgaccggcgccgcgccgttcgactcgctgtcggtggctgatatcggcgatgtgccgatcaatacctacagcctgctcaaatcggtgcaaattatcgaagattactacaccggtttgaatagttatccgctgatcccgctgaccctcggcggggaccacaccattaccctgccgatcctgcgggcgctgaccaaaaaacatggtccggtgggcctcatccacgtcgacgcccataccgacaccaatgatgagatgttcggagagaaaatcgcccacggcaccaccttccgccgcgccgttgaggagggactgctcgacctcaaacgggtggtgcagattggccagcgcgcccagggctatgccgccggcgacttccagtggggcgttgaccagggctttcgcctggtgcaggcggagcagtgctggcatacctcgctggcgccgctgatggccgaagtccgccagcagatgggcgacgggccggtgtatctcagctttgatatcgacagcctcgatcccatctgggctccgggaaccgggacgccggaagttggcggtctgacctccattcaggcgctggagatcgtccgcggctgccgcggcctgaatctgattggcgccgatctggtcgaggtctcgccccctacgacgtgagcggtaatacctcccagctggcggccaacctgctgtacgagatgctctgcgtcctgcccggcgtgaagtacgcctgaggaagccgccatggagctgaaatgctttcgcaccctctggggagtgacgaccccctggccgcaaacgctggatgaactgcagcgcgtcggctgctgcggtatcgaagcccgcgtgccgttaacggtagccgagcggcggcagctcgccgaccgcctgcaggcgtcggggctggagtatatcgccattcttttcagcggcggcggggtgctccccgcccagcatgaaacgcccgagcagcatctggcgcgcctgcagacccgtttcgccgaggccagcggcctcaacccgcgctttgtcaatctgctcgcgggcaacgatcgctggccgctggcgcagcaagtcgattttctcggcaaggcgcacgagctggccgccgggtttggtttgacctgcagctttgaaacccatcgcgccacctcgctgtacagcccgtggctcaccctggagatcattcagcagctcccccagctgcgctttaccgccgacatcagccactgggtggtggtcagcgagcgcctgctggatgaccccagcgatgacttcagcgcctttatcgaccgcgtgcatcacgtgcaggctcgggtgggctacgaccaggggccgcaggtgccgcacccggcggcgcctgagtatcagccggcgctggcttttgccgagcgcttctggcagcaaatctggcgttcgcagcgccagcgcggctacccgcagaccacgctgaccccggagtttggcgccgacggctatctgcaccatctgccgttcaccaacgttccggtggccgatctctggtcgctcaacgcctggatggccacgcgccagcaggcccactttcagcagtttttatcgctcactgaacaggaaccgcagccatgatcgccgtgaagcacgcttttactgaactcccgaccatcgatatccgcgatctggccggcgatgacctcgccaggcgtcaggcggtggccgacgccatcggccgcgcggcgcgcgaggtgggctttttctacatcaccggccacggcatcgacccggcgctgatcgccggcgtccgcgaggcggcgaagcagatcttcgccctgccgatggaggagaagatgaactattacatcggccactccaaaagccataagggctacgttccggaaggagaagagatctacggctccggcaagccggaccataaagaggctttcgatatcggcttccaggcagcggatgaccatccgctggtgctcgccggtacgccgctgatcggcgccaacgagtggcccgatctgccggatttccgcgcgcgggtgctggcctactacgacgcggttttcgccctcggccaccgtctgttcgacgctttcgccctcgcgctcggcctgccggaagggtatttcaaaccgatggtgacctgcccgccggctaagctgcggctgatccattacccgttcgacgccagcgtcgaagatgttcccggaattggtgcacacaccgactatgagtgcttcaccctgctgctcgccgaccagcccggccttgaagttctcaatgaagaaagcgtgtggatcgatgcacctcccgtcaaaaacgccgccggagaagaggcgttcgtgatcaatatcggcgacatgctggaagtgctcagcgctggcacatttgttgctacagcccaccgggtgcgcaaagtgccgcaggagcggtactccttcccgctgtttttcgcctgcgattaccacacgctgatccgcccgctgccgacctttctcgccgccggcgaagccggtgaatatcaggagctcagcatcggggagcatatgtggagccaggccctgcaaacctatcgctacctgcgcgagaaggtcaatcgcggtgaacttcagctaccggagcgcgcgcgcggcaccaatacgtttggccatttgaaaaaacaggctcagcaaaaaaaaccctaaccacccgtgaggatccatgatgactagcaccctgaaaaaaatctcgcgccgtgtcgcgcttaccctcgccgtcagcgcctgtttctcccctgtcacccaggcggcggaactgctgaccgagggcgtctttaaggtggggatggaggtcacctacccgccgtttgagtcctatgacagcaataacaacatcgtcggtctcgacccggagtttgccgcgctgatcgcccaacatctgcaggccaaaccgcagctgatcgacaccaagttcaccagcctgatcctcggcatcggcaagaaatatgacgcggtgatctccgggatgtacgtgacgccggagcgccagaagcaggccgacgccatcccttacgccctctccggcgcgtcgatcatcgccctgaagggcggcgcggtgcagccgaaaaccgaagatgagctgtgcggcgtgaaggtcggtctgcaggcgggcaccacctgggtgaccagcctgaaaaaacactccgatgagtggtgcctgaaaaacggcaaaccggccatcaccattcaggagttcccgacggcgccggaagcctcccaggcgctgctgtcgaagaacatcggcgcccagcttgagattgccccggcggcgcagatcattgtcgacaagagccgcggccgcctggcgataagctctacgcgcctggtctacccgctgccgctggggatctacgtcgccaaaggcaacaccgagctggcggaggcgatcaaggccaccctggccacgctgaaggccaacggccaatatgccgcgttgatcaaaaaatacaacttagaaagcatcgattaagacaataagcactgcgcaacaggagtcagtatggcgttcgattggggatactttttttcattgtttagcattggggcattctggcaggcgtgcgtgaccgtcatcgtaatcagcaccttgtcctggggtatcggcctggtagtcggttttctgttagcctgcgcgaagctctcggcgccgcgctgggtcaagatccccgtcgaactctatatctggttttttcgcagcgtgccgctgatggtgctgctggtgtttgtctacaacctgccgcagctgtttccggtgacccagccgctgctcggggtgccgtttatcgccgggctggtgtcgatgaccgtcaccgaggcggcctatatggcggagatccaccgcggcgggctgctgtcggtggccaaggggcagagcgaggcaggccatgcgctgagcttcagctttatcggcatccagcggctgattgtgatccctcaggcgtttcgcatctcgctgccgacgctgatcaatgaatacatcaccatcattaagctgagctcgattctgtcggtggtctccttacccgagctgctgctcaccggccagcgcttgtatgcgcagaatttccttgtgatggagaccctgctggcggtagcggtgtactacgtgatggtggttaccgtcttcacctggctgttccgggcgctggaaaatcgtctcgatattcagcgtaagcgtccgcaaaccctcagcgaggcggaatgccaggcgctgcgccagagcctgccggcgctgacggaagagatcaaaacgccggccgtcaacggcgcgccgccagcgctcgatctgcggggcattcgcaaatcctgggggcagcatgaggtgctgaaaggcatcgatctgcaggtggagaacggggaggtgatcagcatcatcggcccgtccggctccggcaaaaccaccctgatccgcaccatcaacgccctcgaaagccttgatggcggggagatcattctctacggcgaggactatcttaagggcggagccatcgtcgacaaacgccagatgcgcgccggggtacggcgcatcggcatggtcttccagagcttcaacctgttcccccaccgcacggtgctcgacaacgtgatgctggccccgcgctatcaccagctgctggaccagccggtcgcccgcgagcaggccctggcgctgctcgaccgcgtcggcctgctggcccatgcccacaagtaccccggacagctctccggcggccagcagcagcgcgtggcgatcgcccgggcgctggcgctgaagccggacattatgctgtttgacgaaccgacctcggcgctggatcccgagctggtaggcgaagtgctgaaggtcattcagtcgctggcccgcgaaggcatgaccatgttgattgtcactcacgagatggacttcgccctgtcgatttccgaccgcgtggtgctgatggagaacggcgtggtgcaggccgatatcgccccgcaggtgatccgcagcccgctggaggcgccttctctgcaacgaatccgtgaatttatgggagtacgctaaatggcaactgagcaacacctgcgccagcagctggccgccgcctaccggctggcggcgctgttcggctgggaggataccctctacactcacttctccgtgcgcctgcccggcgacggcgagccgcgttttttaattaatcccttcggcatgatgtttgacgaagtcaccgccagcaacctgatcgtagtggatatgcagggcaaggtcgtagcgggcgacgcgccggctaactcggcgggctttaccatccatagcgcggtgcatatggcccgggaagacgcccactgcgtgatccacacccatacgctgccggggatggcggtggccgcctgcgaggatggcctgctgcagctcaaccagatcagcaccgagttttaccagcgcgtcggctaccatccctatgaaggggtggcctttgacctcgacgaacgggcgcgcatccagcgctcgctggggaataatatcgctatgatcctgcagagccacggcctgctgtcggtgggccgcaccgtggctgacgcgttttacatcatgtactacctgaaccgcgcctgcgagatccagatggccgccgcccagctggcggccctcagcccgatccacaccatcgccccgcaccttagccagcacgcctgcgagcagctgatgggcgtggagcatgaacgtcaacaggtctggcaggcgtggctgcgccgtcttgaccgtctcgatacctcttacaaagactaacgcctatgtctgatatcactatcgtggtggattgtaacgacgcggatttcgcccgcgatatctgcgccgccctgcagcagtttcccgacgtcacggcgcttctgccccatcaccagacggcgcgcgacgcccagtacgccagctgctggttcccggacccgcagctgttgacccgttcgccggggctgaagctgatccaggccgcgtccgccggggtcgatcatctgccgcccgcgctgttcgccagcgagatcccgctgtgccgggtgatcgatgaagattttcgccacggcatgttcgaatatgccctgtggagcgtcctgtggtttcagcgccatttcgaccgggcgctggcccaccagcggacccaaacctggaagctctatccccagcgcgccgccgccgacttccatatcggcattatggggctcggcgaaattggcggctatatcgccgaccagctggcccgcctcggctatcgggtctccggctggtcgcgcagtgaaaagcagctggctggcgtcacctgctatcgcggcgaggaggcgctcgaccactttcttgggtcgcttgacgggctgattaacctcctgccgctcaccgcgcagacccggggtatcctcgccgcgccgctgttcagccggctccccgccggggcggtgttaatcaactgcggccgcggagagcatatggtcaatgaggatgtgctggcggcgctggagagcggccagctcgccggggcggtgctcgacgtcttcccgcaggagccattgccggcggacgatccgctgtggcgccatccgcaggtggtcatcaccccacatatggcctctgcggcctctgccgaggtgatcgcccgccagctgctggagaacattcagcgccagcgccgcgggctgccgctgaaaaacctggtcaataagcacgccggttactgatccccggctatatcgccgctgctacgcttaataggagatccacaaccagaaggcatgaacatgaagattgatttagcgggaaaagtcgcgctggtcaccgcctccacggcgggtattggcttcgccatcgccaaaggcctggcggagagcggcgcagaggtcatccttaacgggcgcagcgagcagagcgtgaacgccgcgatcgcccggctgcaaaatgaggtgccgggcgcgaaggcgcgtcccgccatcgccgacctcagcgacgccgacggcgcagcgcagctgctgcgggccgtgaccggcgtcgatattctggtcaataacgccgggatctatggcccgcaggatttctacgccaccgacgacgcgacctgggacaactactggcagaccaacgtcatgtccggcgtgcgcctgtcgcgggggctgctcccggcgatggtcagcaaaggctgggggcgggtggtgtttatctcctcggaatcggcgcgcaatatcccggcggacatgatccactatggcgtcaccaagaccgcgcagctctcgctggcccgcggcctggcgaaatatgtcgccggcagcggagtgaccgttaacagcgttctgccagggccaacgatttccgacggctttgccgaaatgctgaaagacgaagtggcgaaaaccggtcagtcgctggaggaactggcgaaagcgtttgtcatgacccatcgtccgagctcggtgatccagcgggcggcctcggtggcagaggtcgccaatatggtggtctacgtctgctcgccgcaggcgtcagccacctccggcgccgcgctgcgcgtcgatggcggcgtggtggatgatattctctgaatcccctttatgcaggggagccccctcccctgccgccttcccgggcgctaaaaagcgcaaaatgttaaaaaaacgcggcaaagtcgcacaaagtgaacaggaacatgtattcccagaacttatgatatttgttttaagcataagttgtggtgttaatgtctctgttacgaagcttgcttttctttttcggcgcggcggtcgcggccgccctcgcggtactctgcctgtgggtggatattcgggtgtttggcaacgacatcccggaggtgtcgctcaccgaagtggtccaggagagcgtgctggccgttatcgtgctggttcatctgctgctggcgcggaaatatgcccacttgcgctatagcaatatcctcatcggcggcttctttctcgccatgctgatccgtgagctggatggcctgtttgatttactctcccacggcagctgggtgtggtttgccctgctggccaccgcggggtcgctgctgttgccgttgcgccatctgcgtcagaccctgtcgcagctggcggagtatacccgcaccccgtattacgggatgatgattagcggcctgctggcgattctggtcttctcgcggctgtttggcatgcacggcctgtggtacgccgtgctggaagagaactacgcccgggtggtaaaaaatacggtcgaggaaggcagcgagtcgtttggctatatgctgtgcctgaccgccaccctgggctacgcctgctactttcgcggtctggcgcgacaggcgctgtcgccgcagcgctaatcgtagacgatagccaccgccgggcgtgtctgccggcggtggcgcgccgccgcggttaaccgcgaattttccacttccgtttgagaacctctttgtcctggctatccagccactgattcactttcttcagcagcgccgggttatctttactcatcatatacaccttgttgctggcggtaccggcgaacggtgtttcgttagcaacgcagaacacgccgggctctttgctctggtaatagtcgccttcaatcagatcggtcaccatcatatcggccgttttctgccgcagcgcctgcaggttatcgacattgttctgcacgcgaataatttgcgcctgcttgatgtgttcatcgacaaaactctggtttgtgccgccagggttgacgatcactttcacgtccggacggtcaattttttccagcgaaccgagccgcggggcggcctggcagttggctaaggcgatttttccgttcgccaccaccggatggctgagggcgaaggcttgcgcccgcgccggggtctcggtaaccccacccatcgcaatatcaaacttgtccgcctgcagatcggcggcgagcgcgggccagctggtgtagacgaagctcaccttgagtccgagcgtgcgcccgagatcgcgggccatgtccacgtcatagccctgcagttcgccggcggcattgcgaaacgccagcggcgcgtaatcgcccggcacgcccaccttcagttcaccgctgtgctcgatggattgcatatcgcgcgcctgggcgccgcaggtcattatcgccagcgtcagcgccagccccaccgtcagtctcatttcgccatccttaaagttatcgtttttcatgccagagtgaccggccgcatcagtcacagtatccgccgcgcgagccagggcattcatcctatttttaaacaccgggacatacaacccgacgtggggcaaaacgttaattaatcctctttctcgctgtaagcttgctggttgttttgactttcagtaaaatgccccgcagcgcattcatattttattcctggccatacgtttaatatattatnnnnnnnnnnnnnnnnnnnnnnnnnnnnnnnnnnnnnnnnnnnnnnnnnnnnnnnnnnnnnnnnnnnnnnnnnnnnnnnnnnnnnnnnnnnnnnnnnnnnnnnnnnnnnnnnnnnnnnnnnnngcttatcatcttatttactcccctcctctccagcagtaatacttggttacagaagcagtgtataaggaaatacattatgattattatcatttccgccaataaattttttattaacggcatccggtctctggttaacatgaccatgagtgctcaacgtcggtatagtcaaacattgtttctggataatatttctgacgtgaatgataaaagtctaaccatagccagaaccattatcgtggactatagccacccggacattcaacaattagccgcactgctctatcgtaaaaaaaagatcattcatggcgatatcgtttttgtcgttaaaagtgagattcttgccgatccagtcgaaaacattatcataaactctatttcgacgatcgtgcttgattatatagatgttacccaacggctgcagaaatacttacagaatgcgtctgatcatcgctgtattaaagtgttcagaaaatcaattagctcgctggacagttgtgtcaatattaaacttacgaaacaggaggactctcttctcccctatatcatctcaggtttaaataataagaaaattgctcaggccaccgaccttagcaatatgatgatcagtcactatcggagaaacatctaccagaaacttaatgtccgcaatattgcaggcctgtatcatttcctgcactccctggaggagggataagttcgctttatggctatcacaacaacagagctaacggcttatgcagcgtcaatgagtatgcctggctattagcttccctgggtcacaacagaaggaattggctatgaaaatgaaatcactttgcctggcaatggcactcgtcggcttgacctcacactatgccgccgcggcggacggtacgctgaattttatcggtaaaattgtcaactcatcttgcacgctagtaagcgacaatgagaacggtgtcattgtagttaagatgggctctgttccgctgtctaaattaaaaaatgataccaatggcaccgggccagaagttggggtcaatattagcgtcaaaaattgtgacgcgggcacgtactttattgtgctcgacggtgctccagccctcgatgcgcctagcactaacatactggctctcgatgcgggtaatcctacggcagaaaaagtcggcattaagctaaccgaccgcaataacaccccggtcacgctcgataaacctttcgatcccgacgtcgacccgagtattacgatcaatgccgatggcaccggtaccttcaacctgaaagcctattactacacctgggataaagacaacgccgaagctggcgacggcaatgcgaccgcccggtttaccattatacagcaataatgcctggccagggacggcacgacgcggataaggggtaagatatgaaaacgctgctggcagtgatcataggcgctttggcttttcagacccaggcggccattaccatcgatgcctcacgggttatttattcgggcaaagataaatcggccagtctgaaaattaacaaccgaagcagcaaaaactatatcgtccagacctagcttgatacgggtccggagacccccagcagcggcttacccattgtggcaacgccgcccctggtcaaattacgccccgagcaatcggcacaactgcgctttatttactcaggaaccggtcttcctgccgacagggaaagtctgttttgggtgaatattcaggaggtccctcctgcgcctgaggaaaataatatcctgcagttcgcgattcgcacccgattaaaactattttatcgcccgcaagggattgccacatcgctgcccaaagccgttgaaaatctgcagtggcagcaaagcgctaacacgttatcttttactaacaacagtccactgcatattacggttattaatgccgaggcgatcgacaacaaaggcaaaatctatcctctgaaaaactttatgttgctgccgtacagtcatcacgctgtcaatatcgccagcatgcagcgcttgcataaaatgaaatatattaatgattacggcgccgttgttgatattccaataaaaaaataaacgtcgcacctctttagggagatagagtgatggacgatagtaaattacgctattttgccagcgcatggttaatctccatcacgttaccggcagacagcacggaacgctataatgcccagtttgtgaacggcatcgacccgctggcttttaatcagtttgtcgccagcgatggcgacgtcatgccgggcacctatgacgttaatatttacattaacgatctgctggtggatagccgccccgttcgcttctcagaggatagcgcacatggcgggttggccccctgcctgagcgcggcggaatatatccgctatggcgtcaagattgacgatgaccaccagccctgtttcgcgctgtcgcagacgatccgccaggcagagcaacagctggatatcgctaatcatcagctgatcattcatatccctcagcaatatatcgagcactatccccgtgactatgtttcccccatgcgctttgatgaaggtattaacgctgctttcgtcaactacagctattctaccgatgccaataatggcgacgggggcagccaccagtatcaatatctttcgctaaacagcgggatcaatattgcatcgtggcgattgcgcaataatgcctactggaataagttcagcggccaggcggataagtggcaaagcatcgccagttgggcggaaacgaacatcattccctggcgcagccggcttgtcgtcggccagaccagtaccgacaacagcgtcttcgatagcgtccagtttcgcggcgtacagcttggcaccgatgccgaaatgcgccccagcagccagaccggcttcgcgccggtcattcgcggtgtggccaacagcaatgcccgggtggaagttcggcagaacaactatctgatttacagcgagaacgtcccagccggtccctttgagctaaatgatatcagcgccgttaaccgcagcggtgatttctacgtaaccgtcattgaagccgacggtagccagacgacctttactgtcgcctacaccaccctgccacagctggtgcgggcaggccaatggaattatcagctgtcggcgggtaagtatcatgacggcgctgacggctatgcccccgccctgatgcaaagctcgctctcttatggcctgaataataccttcacactgtacggtggcgcccttgcagcggagaactatcgcgccggcgcctttggcgtcggtagcaatctgggggagattggcgccctctcagccgactatacgctggcgggaacgacgctggcgaatggccagcgcaagcagggagggagcgtgcgttttctgtatgctaaatcctttttgtcgagcaagaccgactttcaaatcgcgggctaccgttactcaaccgcaggttattatagcctcagcgatgcggttaacgagcgtcgacgctggcacaatggcctgtacgaaaatgattactggccctctgacgaagacgaaagctggcaggcaagcgctccccaacactattacacgtcctggttttataataaaaagcatcgctttgatatttctgcccggcaaactctcggtaagaacagcgctttcttccttaacttcagccagcaaaattactggaatagctcaggaagcgatatctcgctgcaggcgggctttaacagcactatccataacgtgaactatggtctgtactatcagaatacgcgcagccacttcacccatgacgacaatagcataacactgcgcgtttccatcccttttactctgcaagaagatcgccggatcaataccgcatttaccctcgcccacagtaaatcgtctggcacgtccgggcaggctggggtaaacggcacgctgctcgatgatggtcgcctgagctgggccgtcaccagcgcctatgatgacaccagccttagcaccaacagcgccagcctgggttatctcggccagtacggtaatctgtatactggctacgcctacagcaaaagccatcgtcaggcgagtctgaatctgagcggcggcgtggtggcgcaccgcggcggcgttaccctctcgcaaccgctgggctcaacctttgcgctagtggaggccaaagacgctcagggggtagggatagagaatcagaccggcgtgcgcatcgatcccttcggctacgctgtcgtaccacaaagcgttccctatcgggtcaattctgtcgtgctcaaccctcaggacttcgatacctttcttgatgtccctaacgcggtagcggataccgtgcctacccgcggggcaatcacccgggtgcgctttgatacattccggggatatagcgtgctgatccataccaccctcgccgacggcagctatccaccattgggcgcacagctctatcgcgccagtgggatcagcaatggtctggtcggcccgggaggagaagtttacgtcagcggagtcgattcaggcgaaaagctgcagatgaaatggggcgaaacgcaccagcaaagctgcgaaatcaccctgcccgaactgcgccaggagcctcagcaggcgacggcctggcgtgaattatccttaatctgcacagtaaccccctcgaggtaattatgcgccgacttagcgatacgttatttctgacatggctttccgttctgttcatgctgagcgccttcccggcgcaggcgctgacctgcaagaccacctcgtccacgatcagcgaagtcgtgaatatcgagagcatcattaaagtctccagcagcgagcttattgccaataaaaagatatgggtctccagccctattaccgccaccttcagttgcgaagataccgataattttccgaacggtgaaagcgcctatttctggctggatccggaaaataaagccagcagcttgcccgactttatccaggtaggcattacttacaacggcatcgactatctgctacaaaataaaaaatcggtggagattggcccggcgacgctgtgtgataaaagcgggaatacctgtaagtccccggccattgggcagacattcagcctggtttaccaggtctatatcatctcgacgggccgcagagtgaccggggaaggtaaaatagacgataacctaaaattgtcgctttttcaggtagatggccaaggcggtctacgcaacggcaccgctggcgccaactataatcttttcattaccggcctgaaccgtatccgaacaatggcctgcgtccccacggtatctatttcgccaagcgaaattaactttggcgatattcctgccggtaacgcccgaccgggctactatgaaaaaacacgcccctttaccgtcacctatggtctggtcaagcagggtaacggcagtgattgcgggaccgaacctatgcttgctacgtttagcaccactaatacgatacaggagagcgccattattttgccgcagccggacagcggcttcggcattgccatctcgccaaacgccagcatgcatccccttattgagatgaatgctccgattcactttacgctggcaacgggcgcgaccctcgcgagcacctatacggcggggctgctctggttgtcgagaacgccgaagctggggcctttttccgcgaccgccaaaatcaccgtgacctttgaataacgccgccccaggctagttatactccagggcgaaagtcaccatgctgttggccgtaccggctcccaccgtggcgtcagtctgcacatactgggcgttgaaattgatcgcctcggcggtaccggcgctggcgccggtcacccttttcaggatcggcaagttgctggcctcattgatcttaacgctggtgccgtcgggcactgccgcaccggggttattgccgtaggtcagcttcacgccgacgccgctggcgctgttgctggcctggctcagggccagggtatcgctctccacgctgacgccgaaaaagccgatgcgcacgtcggtcggcgtcggacagaagaccggaatcgaaaagcgcttcgcctggccgccggtagtccctttgccatgaaactccccccggttaaccgtacccagactgacctggatcgtcgatgtcgctacctggcagctgccgctgctgccaatgtccacattcagggcggcgatatcgatgctgaccggcgcgctggcgacaaagctggcgcttgcgctggcctgctgttcaatggtcatctcccccacctgcggcagcggcggcgagttggtatgcgtcccgtccgccagttgcaccgttccggttttatagaaggttaccgcaatcctcaccgtggtttgctgctgcgtcatcagcgccgggagcgtcgcactgtcgcataccaccaccgactcgccgccggcggagtggctgccatcgatggcacgcatcgggccgccggcgcactggaagctgagggcgtaaccaatgccgtcgatagcgctggggtagacatgctgtccgttaatcaccatcggcgagccgccggttttcagctgcttatagacgatgcgtttggcgctcgccgtcggcagctgcaggtcgcaggaaaaagggatcccgctgccgttatccgccatcgcgctggtcatctgtgtattgaccggcagcgtgggtaaatacttgatattaggaatattgaccgtggtctggccgatatttgcgcggcaggtttcagcccgcacgccgggaagataggcgctcagccccagcagaaagaggaaaggaagtagacgaaaaacagatttcatagccgcctcagcgtgcctggcacagtccggagacggttttcaccgtattcagactctgctgtgggttatccggaagatgaaaatgcagcgtgcagctctgcgactggttgttgacgatccaactcaccgccagggttccctcctgcggcacaccgctgagatacacctggccgccgtcggccaccatgccgcccggcggattgccgctctcctcctcctcgaccagccgcgcactggcgccaaacggtagcggcccctgggcattacgcagggtaaacagcacccggttgccaatgtgggtctggtagttggccatcaccaccgcgccgccgccggggatcacggtctgcccctgctggtcgacgtcggtgtcgtcggccatcgactccgtatcgagggtaatgacatttttccggtaggcggtcagagagggcaccacggcatagccgcgccagtcggtgtgcacattgttgccgttttgcaccgccacgccggcggcccccggcgcccggacgatggcgaagctctcacccaccgtctggccgaaggtgacgccgtgcggatgcgcgaccaccgagccggcgcctccccaggtcaactggttgctggcggcgtcatggcgatagccgatctgggcgttgccgaagccgccgtggtagtccagggaggcgctgctgttgctgcctcgtccctggttgccataaccttgctgaaccgagtagaacagatttggccgcgtcggcaccgcgccatacagcgacatctgctgcgaggtatagccattgctgtccgaggtggtgttgtagctcaccgcgctgtcggacagcggaccacccagcggaatattgatattgaatgaccaggagcggtcatttttttgctggccgctggcgcgggtgtagtaatagcccacgccccaggagatccctttccaggcgctgtagaacccaaggtgcaccgtctcatcccgactctgccgatgccagtactcctgcgaccaggcggaaaccgccagactgcccaggccaccaaggctttgcgacaccgacagctcttcccggcgacgccggttgtctacttgcccctgggcgctttcaagggcgctggcttcggcaaaatcgtaatagccgcttgacgagtagcgatagctggcgaggctgaacgcagtgcccgagctgacaaaatttttctgatactgagcgcgcagcgaatggcccgtatagcgcttgcccgacggcgtacgggtgacggcctgggtgacatcccctcccagcgatccgaactcgccaaaaccgcggcccaggcccagcgcccacgcctgatagtcccgggccagctgcgtaccaccgtagagggtgaatcccgccgtcaaaccgtagaacaaagtgccctgcagaaattccggcgagcgcaccgactccccccggagtggtagcggccggcgctgagactgaatttgccgcgcccttcgcgcagcatatatggcaccgcggaatagggctgggtaaaggtacgcaccgcgccattgctctcggtcaccttcacctccagatcgccgctctgcgaggtggggtagagatcgctgatggcgaacgcccccggcgacacaaaggtctcgtagatcacatacccgtgctgagagacggtcactttggcattgctgtgcgccacgccacgaatggtgggggcaaagccgcgctggctgtccgggagcatttcatcgtcagacatcagctggacgccgcgaaactgtatgctgtcaaacacatcgccggtggtataggtatcgccgatccgcagcaagctcttcagcgagcggacatcgcgctgcagccaggtgctctgggtatcccagtgccggcgctgctggtcatactgcattgaggagatgttgcgcagtcgccaggcgcccaggttgaggccgctgcgtaaattgagatagtttgagcggctgctctccccttcgtcggcgttctttatttgcgcgccggaaaaatagtaatcgacaaacgcggccggcacgccatcgtcccagcgcgacggatcgacatagccgcggctttgcacgttcatcgccgcctggggaatactcagcgtcaggcgctggttagcgaagctgaaccgactgctggcgtcgggaataaacttctcgatccgggtgaaggtttcgccttcatgcagcgcttgaaaggcgggaaacgcgctgacgttgacgccatactccgccagctgaccgggcgtcagcaccgggcgcagctgcccgccatcgtcaacaaacgtgatatcagcctgacccagctcctggtcattaaccaccacggtgacaggataagtccccggctgctggccgccgggtttggcgaagtagtgcagatcggaggtttgctgctgcgggtcagcaaactccagcgccgccgggtcaaaatagtcgtcggccagcgcccggctcaacggactgagacaaaacatcatcgtcggcaccgtcgccagcgccaccgcccgcccggcggtaacgggcaacaaggcatactcccgcaccctggctgttgttattcttttcatgctggcgccgtccggtaagctcatcaaaaaggggaattactgctgggcgaaatcgctgacgccgccgtagtcgttaatcgcccgccatttgacggtgccgtgcccgctcaccggccacgttttctcgccgaagggagccaccatgccgggatcgtcgatgctttgcccgcccacttcgacggcgtaaaaagagacgaagtagggagtgggatttatcaccgtcagccgaccgccggactggctaaacttcagctgctgccaggcctttgccgggtcgcccgccaggtcgttggggcgatagaagattttgaatttcgatttaatattcacctgcagcttattcacctcgccctgacgcgtcggggcgatacttttgacgttcagccagaagaccgattcacggtcgcggggcagcgaggcgccaataaagttaatccgcagaacgttattttgctccggatcgagacggaacaagggcggcgttacaatgaagggcaccctggccttatcgttttccgcgtaattttccacccacgactgcaccagatagggcgtatgggtatcggcattggtgactgaaatagcggcttcacgcttcccttcctgataaatcacacgggttccacccatgacaataccggcctgcgctgccgtggtgcacagcagaaaagccgcaacggcaattattttcttcatcatgacttaccatcaggtaaaagttgaacagacaacaaaataaagcagtgaataacagagccagtactcgacgggataattagcaaaaacaactataccgtcacgaatatatttcgtgacttcgtgacaattaacacattagctatctgtaattaatcaagacgcagtgggctgactctgaataacgcgcaattagatcagttataaatcatattgaaattagctgtaccgtcggctttacctgccgtcacggtcgccgcggtggagatatagtcggcgtaaaactcgaggtcggcagagccggtgccgccgctggtacccggagtgaccgtctgtttggctgacgttttaccgaggctgacagccgtcgaccgatcgtgctcatacagcttaatcgctacgccgctggcgccgccgttgatggccagcagggagttatcagactgatcgcgcgcgccgtcaaacagcacggcgaccgtagtcacgctggccgggcaatctttcactttgatatggaagggggttttggtggtttcaaaaccagtgccggtaaaatagttgctggcccatttgcccagatcaaccttctggccattagaactactatcgacgttgcaagagctgtcggtgattgacccattgaagatgacctgcccgccggcgccttccgaactggtgcccgagtcaggattgatagtgttggccgcggtagcctgcaaggctacgccagaaagcagcgctcctatgaggatggttataaagcgaggttgttttttcattatttatctcatcgttaacgaacatattttccatcatcgacaatagccccaaagctatcgcgaaacggctcgtcagctcctccctgtaaatgtacgttgcgttccttccgcaggatattaggcacatccccctctactctgccttatttcgccaatagatggccatgaataacaaacagaagaaaaaagagttattttgatgtgcgaaataaatatattacccgaagtatcaaaaggcaacccggggagatgttaactataagttaatagctatgttcgccatatatttaatttttgaaatggcttttcaatgttaatttacatatctatacaaaagaaattcaaatacctttaaacaacaacagatcaattcaattaacaaatttaaagacaattgttcaaaaattcgtcttgttttattgtgcgctcgtcagagcgtacacaaaaattaggaattttcctggtattaatattcataatttctacacaaacgacgccagggtgcgccacctccaccggctaatcccttattatggaagtgtttttattttcaagtgaaagccaatacataagtgacataaatacatgggcgctgccgccggcaaaatagccaccatcttcacatggttattttgaagtaaaaaaaatccgcaacccgaatggattgcggactgaggatcggtcagaaatgagatggacttcagaacaggcccagcggcgcggtgccgtagctcaccagcaggtttttggtttgctgataggcatccagcgccatcttgtgcgtttcccgcccgacgccggactgtttatagccgccgaacgccgcatgcgccgggtagacatgatagcagttggtccacacgcgaccggctttaatgccgcgacccatgcgataggcgaggttggtatcccgcgtccacaccccggcgccgagaccaaactgggtctcattggcgatagccagcgcttccgcttcgtccttaaaggtggtcaccccgatcaccggcccaaagatctcctcctggaaggaacgcatatcgttgcgacctttaatcagcgtgggctgaatataaaaaccattatccagcgccggcgcgatagccgcccgctcgcctccggtcagaatttgcccaccctcttcccgggcaatctgaatataggagaggatcttgtcgaactgctggcgggaagcctgagcgccgatcatggtgtcggtatctaacggatcgccgcggcggatctgcgccaccttctccatgacccgtgccataaagggctcatagatggattcatggatcagcgcccgcgacgggcaggtacagacctcaccctggttgaagaagccgagcaccagcccctccaccgccttctcaataaattcctcttctccgtccatcacgtcggcgaagtagatgttgggcgatttcccccccagctcgacggtgcaggggataatattttccgccgcgcaggcgagaatatgccgcccgaccggcgtggagccggtaaacgccagcttggcgatacgcttgctggtggccagcgcctcgcccgcctctttgccgaaaccctgcaccacgttaagcaccccggccgggaacagatcgccgatcagctccagcagcagggtaatgcttagcggcgtctgttccgccggtttgagcaccacgcagttccccgccgccagggccggggccagcttccacgcggccatcagcagcgggaagttccacgggataatctgcccgaccacccccagcggttcatggaaatgataggccaccgtggtttcgtcaatctcggcggtgcttccctcctgagcgcgcaggcagccggcgaagtagcgaaaatgatccaccgccagcggcaggtcggcattcagggtttcgcggatcggtttcccattgtcccagctctccgccaccgccagatattccagatgctgttcaatacgatcggcgacctgcagcagcagcctggagcgctgttgcactgaggttttaccccacgccggcgccgcgcgatgggcggcgtcgagggcgaagtcaatgtctctggcatccgagcggggaaactgcgcaatgttgctgccgtcgaccggcgaagtattcataaagaattcaccgctcagcggctcgacaaatctaccgtcaataaagttgccgtaagccgatttaaatgaaaccacggcgccgggctggccaggatgtgcataacgcatcgcaaatctccttctgtagggttgagacgcagcggcatattgattttttaaatttgccgccgaacgcttctcactttgcaggggttatgccagttttttattttctttaaatattttttatttattaatacgttgccttcactaaccgagcagatggtcagccactgtcgcacgggtttccacttatgtgttgcaaatcgcaacaccaaataaaccaaatggctacaatattgcaacacagcaacatcgacccagaggtgccctgtggcaggcaatccctttcttctcgcaccagaggttaatgcgaatcccctgctgagcgattcgtggtctcgctgccagcgctacgggctggatcccgccaccgaggattttccccgcctcggcgccggcgagctggcggaccggctcgccagccaccgcggcctgcagcatctggcgcagccggtggtggaagccctgtcgcgccaggtcgcagacctgcagtcggtggtgatcctttccgaccccgacggcctggtgctgcatactctcggcgatacccaggcgctgcaaaaggcccagcgcgtggcgctggctcccggcaatctgtggagtgaaagcgggcgcgggaccaacgccatcggcaccgcgctggcgattgacgatggctgcgagatcgatggccgtcagcactttcttacccgcaaccagaatctgtactgcgcggcgatgccgctccagcgaccggacggaagcatcgccggggtgctggatatctccggcccggcgaattttccccaccagcacacctttggctgggtaaaagcggcggcaaagcaaattgaatatctgtgggtgaaacagagtctgcatcctgagcagtggctgatgagcctgcaccggcaggtggacaaactcgacagcgtcgaggagctgctgctggtcttttccgacaacgtcctcaccgccggcaaccggctggcgatgcgcgagttcggcctgagcgcggcgcagtttggccagctcacctttgcctcgctttttccgacgctgacgcaaacggcggtcagcgtcccgctgccgctgaccacgccgcagggccgctaccactatcgcctgcgggagcctacccgccgccgggtggcggtaagcgccccgccggccatgcatctcccctttaccagtccgcgcgaaggcgaaaagctgctgcggctgctcaacgccggcatcgccctgtgcattgaaggagaaaccggcagcggcaaagagtatgtcagccgcacgttgcaccggcacagccgctggcgcagcggtaaatttgtcgccattaactgtgccgccattccggaatcgctgatcgaatccgagctcttcggctaccagccgggggcgtttaccggcgccagcaaaaatggctatatcggtaaaatccgcgaggctgacggcggggtgctgtttcttgatgagatcggcgatatgccgctggcgctgcagacccgcctcctgcgcgtcctgcaggagaaagaggtcgctccgctgggcgccagccgcagcgtgccggtgaatttcgccttgatctgcgccacccaccgcaacctgacccagcgggtcagcgccggagaattccgtgaagatctgctgtggcgcctgcgggaatacgccctggcgctgcctccgctgcgcgagtggccggcgctggaaacctttatcgccaccctgtggcacgacctgggcggtgcttcacgccgggtgacgctttcaaacgcgctgctggttcacctcagccagctgccgtggccgggaaacgtacgccagctgcagagcgtcctgaaggtaatgctggctctcgccgatgagggcgacacgctgacgcccgacgcgctgccggaggcgtatcgcgccgcgcctgcgccgttgccgcgcgggggattgcaggcccatgatgagcagttgattgtcgataccctggccagggtcaacggcaacgtcagccgggcggcgcagatactgggtatcgcccgcagcacgttgtaccgccgtgccgcccgtgccggacggcctcgtcgctgaggctatggcgtaaagcgcgccggtagcttgcacgctgtcggaaaacctccgccgccatagatggcggttatttctctctgcgctaaccaggtgttgcggtaagaggcagcccttcccgcagggcatcgatcgccgcccgcgttttttgcggcagccacggcccctccggccataccgcgtggatggcgaaacgcacctgagcgctgggcgccaacacctgctgcaatgtcccatcggcaagcgcctgcgccaccagccagtccggcagccaggcgatgcccatcccctgctgcactgccgccgcgatggcggcaaaatcatcctgtatcagccacgtctgcggactgaagcgcacttcgccctgctgcgggtcatacagttgccatttttgcagctggccgttgtgcagatagccgagggtacggtgctcgttcaacccggcaatagtctgcggcgctggctgctggcgcaggtactccgccgccgcgcacagcaccatgccgtgctctcccagcgcacgggcccgcagcgacccggtatcggccaggctcccgatacgcaccgcaagatcaaacccctcctccagcagattgacctgccggtcgctgtagtggagctcgagcttcagtaacggatagcgctggctgaggcggaacagcagcggtgccacgcagcgctggccaaacagcaccggcagcgacacccgcagccgcccctgcacctcatctttgccgcgctgcagcgtctcttcggcctcgcggatgcgctccagcgcttcccggcactggagatagaattgctccccctcttccgtcagcagttgccgtcgggtggtacgctggaataacgccacgccgagacgcgcttccagccgggcaatggtttttcccaccgccgaacgcgtcacatggaggatcgccgccgcgctggcaaagttgccgctctcgaccacggtgacaaataccgggatcgcattcagatcgtcgcgcacagattggttccttacgggatacaatagggaaaaataatgtcactcctgagacaaaaaagacagtgttagtctttgcttctatctttcatttgaggcactcatcatggctaacgttctggttttaaaatccagcattaatggcgaaacatccctgaccaatcagttgattaacgaatttctcgcggcgcgccaggcggcgggacacggcgatcggctcatcgaacacgatctcagcgccatggcgctgccaacgctggatcgccccctgttcgccgccctgcgcggggcagtggatccgcagcctgctatccgcgaggcggtcgccctctccgaccagcttatcgccgagttaaaggccagcgacctgctggtgatcggcgcgccgatgtataacctcaacgtcccgaccgatctaaaaaaatggttcgacctcgtggcgcgggcgcgggaaacctttcgctacaccgagagctggccgcaggggctggtggagggcgtccgggcggtggtcgtcagcagccgcggcggtattcaccagggagaaactaccgacgccgtcacgccctatctgcgcgcggtactggggctgatggggatccaggaggtggaatttatctatgccgaagggctggacaatcgcccgcatggtcgcgacgccgggatcgccagcgcccgggcgcagattgcccggctcgccgttccggcctgagtcgtggagaaattgtgctggcgctggcggcctttttattttagagttatctaaatttagacaaagctaaaataaatgaccacacctgaagacctgcaggcccgcgccggagaagccgccgcgctgatgaaagcgatgagcaatcctcaccgattgctgatcctgtgcatgctgtgcgatgcgcccagggccagcgccggcgaactcgcccgggctacagggctgagcccctccgccacctcgcaacacctcgcgcggatgcgtgacgaggggctgatcgacagcgagcgcgacgcccagcgtatccactatttcatcacccaccctgcggtacagcaggtgatcaatacgctgaaaacgctctattgcccgtgaggatcctatgaccatcgccaccttaactcccgccgaggcccaggcgcagattgcccagggcgccagactgattgatatccgcgatgcggatgaatatgcgcgcgaacatatccccgatgccgagctggtgccgctcgccactctgaccagcggtgcgcccctcaatgcccgggccggagagacggtcatctttcactgccaggcgggttcccggacgcagaataatgcgattcgtctggccgcggccgccgcgccggcgcagccttgtctgctggcaggaggatttcaggcgtggaaagccgcggggttgccggtagtggaagattcatcgcagccgctgccgctgatgcgccaggtgcaaattgccgctggcgtcctgattttactgggggtgctgctgggctataccgttaacggcggctttttcctgctcagcggcgcggtcggcgccgggctcaccttcgccggcgtaaccggcttttgcggcatggcgcgtctgctggcgaccatgccgtggaaccggcgccagggggttaaaacgcgctccagataagccaggcaatgccgccgaagagcagccatttgacgatgtaatagaccgtcttattccattttttcaaccgcttaccaacaatacggatctggtaaatatagcgaaacgcccggttaatcccgccggtgcgatcgccgatatcgttgggcgccgaagcggcgctcatcagatgacgtcccagccagtggttaactttctgcgcccagcggtagcgcatcggccgttcaatatcgcagaacagaatcaggcgattctcaccactggtattttccgcatagtggatataggtctcatcaaacagcacgccttctccatcgcgccagctgtaacgctggccatccacctcaataaagcagcggtcatcgttcggcgttgccaggcccagatgaaagcgtagcgagccggcgtaggggtcgcgatggcgcggcagacggctaccgtccggcagagtggcaaacatggccgctttcaccgacgggatatcgcgcagcagcgcggtagtttgcggacagagctggctggcggaaggatgggcatcctcataccatttcagataaaagcgtttccagccggttttgaaaaatgagttaaacccggcatcgttatatttatcggccgctttaatctgctccagctgctgaaggtggagaccttcgtcgcgaataacctgccagttttgctgcaatatcgccagctcgggaaacatctccggccgcagataaggcgtattcggcacgcgggaaaataaatacataaatccattcagcggcgcggtaaatgtggaatggtcggagagctgccgccagaaacgatagcgcacccgtccgcggtaatggacatacagtacagcaataacaatgatcaacagaatgatatacttcatggtgtctttcctgacctgattggtggtaaccctaccctcgccgtccccctttctcagcagcggtatggcgccagcaaaacattaacaatgttaatacatataactccaaattgttttaacaaaaaacagcacgcccggtgttcagtgagcgggcgttgagctatggtttaggtttatccatggtgttaacagtgaggagtgaattatgtttgctgtcggcgatctggtacaaccccgagcgggcggaccaaaactgaaagtggtggaagtgcaaggggagcaactggtggtggttcaggccgcacaggagcagggagagcgctattcgctgaagtcggacgaggtcacgccgtatcaggaagagggagacttcggcgtctgctaaagcccctcgcttaaagtcgtaaggccaggccggtgggtctctcaccaccgggctggcgctggcccgaaggcgttaaattaaaaagctatccagcgatttaccctgggcgacagcctcggcaatcggcttcggcattcttccctgtccggtccaggttttctctgcgccagtatgatcggtataacgatatttcgccgggcgcggttgacgctttttgcctcccgcctttggcggctgaatatcggccaccagctcgtcaggagaaataccgtcggcgcgcatcagttcaagccaggtattcactttctcctgatattcagcctgctgctgagctgcctgctgctgttgcgtacgtttttcttcagtgacgatcctgagcttttccagcatctcttcaagcacgtcaatggagaattcacgggacagggcacgcagtgaacggatattattcagtttgtgtaacattgaagacataaaattaaaaaattccaaatagcaaattaaaagatacaacgcggcaagtgtaatagaaacgtttatttatttccagccttcggttgtccagataaatatataaggtggatattagcggttatcccctggaactatattggcaaatacctgagcctttttcataagcacaggcaaaaaagagaatgaataaataaaaaaggcagaatgacgggaaaaaccaccgttctcgccaggaatattagctttatggtcagcgggttacctgctgttcatacgtggccgcactgatacatacctttggccacagtgaatagttaatcagaaaatgggaataaaacgacaattcgcaattcagaatttttcaccataaaaaagcgacttacggcataaaaaatcctaaaagagagcggaatcacacactcgcgtgatgttgcgccatggttggctatcaggcgccgttccttcggccagtctcgatttcgcaatcaagagtaacacattgataaatattgatatttgtaaaaacaggaataaaagtagcgtaacgaacaaaaaacaaaccagcgcagagtattttatcgacaaaaaggcgataaataaaaatttatagctagttgccacttttaatgcagagatatactctacgcacatcaaaacaggcagcccaaaaacgctataccaacgcgcatttttcggcgttaatgacttcattttcgaggagcactccgatgttctctgcgcactcccgcatgcggttgcagacacctttgcgatggtggtttactgcaccgtcgtcaacatgatgatcgaaatttttctctctggtatgacgtttgagcagtcgttatcgtcgcgtctggtggcgatcccggtcaacattattattgccgtaccctatgggatttatcgcgatttcgccatgcgtcaggcccggcgcatcagcccggccaggtggatgaaaaatatggccgacgtgctggcctacgtcacctttcagtcgccggtgtatgtcgctattctgtggagcgtgggtgctgactggcaccagattgtcgccgcggtgagctcgaacctggcggtatcgatgatgatgggcgccgcctacggctacttcctcgactattgccgccgcctgttccgcgtggcgccctatcagcaggcgaaggcctgaccaacgcgttagcagcgactggctctgccagtcgcctcttcccgccagcccgcctcgcctggatccttaaatgcctatcgccgtattaattcgtcgacattgccggctgggcttcgccaaatagcccattcagaaaacgctcaagcgccatgcgtgagctaaatccatgcggaataccataatgttgttgcgcatccccggctaaatacagcggaaactgttcataatgatcacaggttttgatatctgaagccggttcggccagcatattgctgcgctcttttaacgccggatgaataactaacgctgttcgccccatgcgcgcttcgcggttcacataaacataattatcgccgcggcgatagccgtacgctttttgcgtcacaacatccatggtgaagccggctttttcaagaacacgcgccacctcatcgggtcttaaatacatactgattcctcgttatcttttaccgcacattgaccttaccttattcattaaggacagtgctttcggaaaattccagaaaccacaacagtaagcataattcaaaatcttgtcctacacttactcactcgatggaattaagggagataacgatggctaaccatgtgaaccgcaacaattttgacgagaacgccgaagatattcataacgatgtcagccaattagcggatacgctggaagaggtgctgaaatcatggggcagtgacgccaaagaggaagcggaagcggcgcgtgtcaaagcgcagtcgctgttaaaagagactcgtgcccgccttaatggccacaaccgggtgcagcaggcggcgctggatgcgcgccaggcagcgtgcgatgcgctgggctgtgccgatacctacgtgcgcaataaaccgtggcacagtgtgggcgccgccgccgccgtcggggtatttattggcgtattgctcaatttacgtcgataatagcttaagcgtcggctgccgccgcgcgattggcgcgcggtagcccgcgagctttacggaaggcaatgaagataacaaatacgcgtcagcccctgtgcgcctctggccgcaggggtttttctgcttccccgacttaagcgccatcaaatcgcgatcgcctctctcagccgtcgggcaagtccatcagccatcgccggcgaacgtatattggtaaaactcatcaataatccccccacgcccgcgtggcgaatccgccagtcgctcagcgcctgcaccgccagcccggccacaaccgcccgccgcgcgagcagccgatcgtcgccgctgaccgacataaccagttgaattccccccagctgcggcgtgacctgaaagccctgcgcctgcagagccgactccagccactgtctacgctggctatagctggcgcgcattttcttcaaatgacgccaaaaatgtccctgctggataaaatccgccagcgtctgctgccacagggtgggaacggtgcaggactggcgctccgcggtctggtgaaaacgcgccaccagcggggtcggcaccaccagccaggcggtgcgcagcgccgggaacatcgacttactgaaggtgcccgcgtagatgaccctctgcggcgcatcaaggcttttcagcggcggcagcggtttgccgtgatagcgaaactcgctatcgtaatcgtcctcaatgatccacgcgtcgcgctccgcggcccacgccagcagctggcggcgtcggggaagcgacagcgcgacccccagcggactctgatgggctggtgtgagcagggcaaatcgcgcctgcgggtgatgacgctggccccagccgacgtccatcccttcgtcgtccacgggaatcgcatccaccgccagctgcccagcctcgacgaccggccggataaagggataccccggatcttccatccacatatgctgtcccggctgcgccagggtacgcaggataagattcatggaggcggcatagctgccggtgatcaacacctgatccggctgacagtcgatactgcgcgacaggcgtagataatcgacgatagcctggcgcagaagcggatcgccgccgggatcgccgggtgcaagatcgaaccgcgactgcgtccgcagccgacgccccatcacccgcgcccactgcccgcgcggaaagagatccagcgccggcagccccatctgaaacggcagcggctccgtcggcgcggccggttgcactggcggtaccggcgccagctggcgcgggctgagccgctcgctgacaaaggtccccgcctgcccacgccgttcgagccatccctgggcgaccagctctccccaggcgttttcgatggtcgcccgggaaacgccctgctcctgagcgtacacccggctggcgggcaaacggctgcccggggtcagttcgccacgttcaatcgccgatttcaactggcgggcgatacgctgataaagcgggaggttaatcgcttccattatggtctgcttttttcatcacaatatggctatcttttgcagtccattataatgctattttggctgccgtcttagagaggagaacaccatgaaccaattacgtcagccattcagtgaactgagcccggaagtctataaagggctggtacaggccagcatcgcgctggagaaaagcgagctgggcaacgccctggtagagctggtttatttacgcgtctcgcagatcaacggctgcgccttctgtcttgagaaacatagccaggcgctgcgcaaaggcggcatggcgcaaagcaaactggatgcccttgcgggctggcgggtaagcgcccactttactccggccgaacgcgcggcgctggcttgggccgagtcggtcaccgacattgccgccagccatgcggaagatgaggtttaccagccgctgcgcgaacattttaccccgcgtcagataagcgatctgaccttcgccgtcagtctgatgaacgcctttaaccgcctcgccgtggccatgcgcctgtagttccgcacagcctcccccctcctccgccgatctatcccggcgggggactcgcttgccaaaaacgctatatattgagtggttgaagttttaaataactacatctagtatttccttatcgaatggcccactacgttcgacgctatgtttagcgccgtgctgttatcttaaatggaaatacgaatcatgcgcattattatttacactcgaaatgactgcgtgcagtgccatgccacccggcgagccatggagagccggggactggcctttgaaatggtcaacgtcgaccagcagccggatgccgccgacaccctgcgcgagcagggatttcgccagctgccggtggtgatcgccggtgagctgcgctggagcggcttccgcccggatatgatcaatcgcctgcgcccctcctttacggcggccagcgcatgagcctcatcgtctacttctccagccgttcggagaatacccatcgctttgtgcagcgcctggggctgccggcggtgcgcatcccgctgaacgagcgtgaacatctgcgggtagacgagccctatattctcatcgttcccagctatggcggcggcggcaccgccggcgcggtaccgcgtcaggcgatccgctttttaaacgacgtgcataaccgccagctgatccgcggagtgattgccgccggcaatcgcaactttggcgacggctgggggcgtgccggagatgtcatcgcgcaaaaatgcgccgtgccctatctctaccgcttcgagctgatgggaacccccgacgatatcaacaccgtgcgtaaaggagtcagcgaattttggcaacgacaaccgcagaacgtataaccgccgccgtggattttcacgccctcaacgcgatgctgaatttgtacgacagcgagggccgcatcccgtttgagaaagatcgccaggcggttgaggcctttatggcgacccaggttcagcccaacgccctcaccttccccagccaggaggataagctcagctggctcgtcagcgagggctattacgatccgcaggtgctggccggctatgaccgcgggtttgtgctggcgttgttcgcccatgcccggcgcgctccgtttcgctttcagaccttcctcggcgcctggaagttctataccagctatgcgctgaagacctttgacggcaagcactacctcgaggatttcgccgaacgcagcgtgatggtggccctgacgctggcccggggcgatgaacagcaggcgcggcagctgacggaggagatactcagcggccgctttcagcccgccacaccgaccttccttaacgctggcaaacagcagcgcggggagctgatctcctgcttcctgctgcgtattgaggataatatggagtccatcggccgggcggtgaactcggcgctacagctgtcgaagcgcggcggcggggtggcctttttactctccaacctgcgcgaggccggggcgccgatcaagcgcatcgaaaaccagtcttctggggtggtgccggtgatgaagatgctggaggacgccttctcctatgccaatcagctcggcgcccgccagggggcgggtgcggtctggctgcatgttcaccatcccgatattttacgctttcttgatacccggcgtgaaaatgccgatgagaaaatccgcatcaaaaccttgtcgctgggggtggtgatccctgatatcaccttccagctggcgaaagaagatgcgcagatggccctgttctcgccttatgacgtcgaacggctgtacggcaaacctttcgccgattgcgccatcggcgacctctatccgcagctggtggccgacgagcgggtccgcaaacgctggatccgcgcccgcgacctgttccagcgcctggcggagatccagtttgaatccggctacccgtacatcatgtttgaagacaccgtgaaccgcgccagtccggtggccgggcgggtcaccatgagcaatctgtgttcggagatcctgcaggtcagtacgccgtccgcctataatgaagacctcagctatgcccatatcggggaagatatctcctgcaacctcggctcgctgaacatcgcccataccatggactcgccggatttcggccgcacaatcgccaccgcggtgcgcgccctgaccgccgtgtccgacatgagcgacattcagtcggttccttccgtagcggccggcaacgcggcttcccacgccatcggcctggggcagatgaatctgcacggttacctggcgcgggaaggcattgcctacggcagcccggaggggctggacttcaccaatatctacttctacaccgtgacctggcacgcgctgcacacctcgatgcagctggcccgcgagcgcggccagcgcttcgccggcttcgagcagtcgcgctacgccagcggggcgtacttcgacaaatatctgcaggaggagtggcagccgaaaaccgaacgggtgcgcgcgctgttcgcccgcgccggcatctctctgcccgaccgggaaagctggcgccagctgcgcgacgatgtcatgcgctatggcatctacaatcgctatctgcaggcggtgccgcccaccggctcgatctcgtacatcaaccatgccacctccagcattcacccgatcgtctcgaagattgagatccgcaaagaggggaaaaccgggcgagtgtactaccccgcgccatttatgaataacgacaatctggccctctaccaggatgcgtatgagatagggccggagaagatcattgacacttacgccgaggcgacgcgccacgtcgaccaggggctgtcgctgaccctgttcttccccgataccgccaccacccgcgatatcaacaaggcgcaaatttacgcctggaagaaaggcatcaagacgctctactacatccgtctgcgccagctggcgctggaaggcactgaaattgaaggctgcgtgtcctgcgcgctgtaaggagaacaggatgacccatttaacgcgcgtcagcgcaatcaactggaaccgcattgatgacgataaagatcttgaggtctggaaccgtctcaccagcaacttctggctgccggagaaagtgccgctgtcgaacgacattcccgcctggcaaaccctcagcgcggcggagcagcagttgaccattcgcgtctttaccggattgaccctgcttgacaccattcagaacaccgtcggcgccccggcgctaatggcggacgccttaaccccgcatgaggaggcggtgctgtcgaacatcagctttatggaggcggttcatgcccgctcttacagctccatcttttccacgctgtgccacagcaaggaggtggatgccgccttcgcctggagcgaaagctgcgatcctctgcagcgcaaggcgcagctgatgctgggttactatcaggccgacgagccgctgaagaaaaaaatcgccagcgtgttcctcgaatcctttctcttctactccggcttctggctgccgatgtacttctccagccggggaaagctgaccaacactgcggatctgatccgcctgatcattcgcgatgaagcggtgcatggctattacatcggctacaagtaccagaaaggactggagatcgtcagccccggcaagcgcgaagaattgaaaaatttcgccctcgatctgctgatggatctttacgacaacgaactggcctacagccgggagctgtacggcgagagcggctggttcgacgacgtcagcgctttcctgtgctacaacgccaacaaagcgctgatgaacctcggctacgaggcgctgttcccggcggagatggcggcggtcaatccggcaatcctcgcagcgctgtcgcccaacgccgacgaaaaccatgactttttctccggttccggctcctcctacgtgataggaaaaatggaagagaccgccgacgacgattgggacttttaaccgtactttcaccaggaatatcgcaggcggattcctggtgattaatttcacaaaatagcgtttaatccaccaaatattctctccatgacctaaccgtcatcacttcgtcatatttagcagaaaaccggtccatttcagtcgaattatccaaagataatcaaaaaatattaccaacaacaaattaccgcccagcccttatatcacgggggcttagccacagttgcccccatctgattttgccgagagtttgccattgagggttgtcacagaatctgagtatgttagggtgtaaaaagatcataatcaccatcgggtatcatatcgcaataaacaaataacaggaacttctctattgcatggcaattaaattagaaatcaaaaatctttataagatatttggcgagcatccacaccgtgctttcaaatatattgagaaaggactcaacaaagcgcaaatactggaaaaaacggggctgtcgcttggcgtcaaagacgccagtctggccattgaagaaggcgagatattcgtcatcatggggctctccggctcggggaaatccaccatggttcgccttctcaatcgcctgattgaacccacccgcggccaggtgctgattgacggggtcgatatcgccaaaatgtcggatgccgagctgcgcgaggtgcgtcgcaagaaaattgcgatggtttttcagtcctttgcgctgatgccgcacatgagcgtgctcgacaacacggcgtttggcatggcgcttgccggcgttcccgccgccgaacgagagcaaaaagcccgggaggcgctgcgtcaggtggggctggagaattatgcccacgcctggccggatgaactctccggcggcatgcgccagcgcgtcggtttagctcgcgccctggcgattaatcccgatattctgttaatggatgaagccttctctgcgctcgatccgctcattcgtaccgaaatgcaggatgagctcatcaaattacaggcgaagcatcaacgcactatcgtctttatttcccatgaccttgatgaagccatgcgaattggcgatcgtatcgccattatgcaaaatggcgaagtggtccaggtcggcactccggatgaaatattaaataatccggccaatgattatgtgcgcaccttcttccgcggcgtggatattagccaggtattcagcgcgaaagatattgcccgccgcagcccggttggcctgattcgtaaaacgcctggttttggcccccgttcggcgctgaaattattacaggatgaagaccgggaatatggctatgtcatagagcgcggtaatcgctttgtcgggattgtctcgattgattctctgaaaacagccctcagcgccgggcaggggatcgaggcagcgctgattgacgccccgctggcggtggaagcgcaaaccccgctcagcgatctgctctcccacgtcggccacgctccgtgcgccgtgccggtagtggatgaagaacaacaatatattggcatcatttccaaacggatgttgctccaggctttagatcgcgagggggtgaatcatggctgatcagaccaatccatggggcagcgccccgtcaaccgacagcgcctcgcaggctgccgacgcctggggtggcgcctctactgccgcgccggctaatggcggcggcgccgactggctgcacagcgcccctgcgccgcagccggaacagttcaatatcatggatccgttccataagaccctgatcccgctcgacagctgggtgacccacgccatcgactggatcgtgctgcacttccgtccgctgttccaggggatccgcgtgccgatcgactacatcctcagcgccttccagcagctgctgttggggatgccggcgccggtggcgattatcgtcttcgcgctaatcgcctggcagatctccagcctcggcatgggggtcgccactctggtatcgctgattgccatcggcgccatcggcgcgtggtcgcaagccatggtcactctggcgctggtcctcaccgccctgctgttctgcatggttatcggcttgccgctggggatctggctagcgcgcagcccgcgggcggcgaaaatcatccgcccgctgttggatgccatgcagaccacgccggcgttcgtctatctggtgccgatcgtgatgctgttcggcatcggcaacgtaccgggcgtggtggtgacgattatcttcgccctgccgccgatcgtccgtctgaccatcctcgggataaaccaggtgcctgcggatctgatcgaagcgtcgcgctcatttggcgccagcccgcgccagctgctgtttaaggtgcagctgccgctggccatgcccaccattatggccggggttaaccagaccctgatgctggccctgtcgatggtagtgatcgcctcgatgatcgccgtcggcggcctcggccagatggtgctgcgcggtatcggtcgcctggatatgggcctggcgaccgtcggcggggtggggatcgtgatcctggcgattattcttgaccgcctcacccaggccgtcggtcgcgacgcccgcagtcgcggcaaccgccgctggtacaccaccggcccgctggggcttatcactcgccctttctgtcgataagtcgataacagcgccgctccccggcaccagccgatgcccgggagcggcccttcccgttaaacaataagaggaaccaccatgcgacatagtacgatgttggccaccgccgcctttgccaccctgctcgccaccagcgccttcgccgccgacctgccgggtaaagggattacggtgaagcccgctcagagcactatctccgaagagagcttccagaccctgctggtcagtcgcgcgctggagaagctgggctacaccgtcgagaaacccagcgaagtggactataacgttgcctatacgtcgattgccgccggagataccacctttatcgccaccaactggcaaccgctgcacgatgacatgtacgccgcggcgggcggtgataacaaattctatcgcaaaggagtgtacgtctcaggcgccgcccagggctatttgatcgacaaaaaaaccgctgagcagtaccacatcacctccatcgatcagctcaaagatccgcagatcgccaaactgtttgataccaacaatgacggtaaagcggatctcaccggctgtaccccaggatggggctgcgaagcagtgattaaccatcagattgacgcctatggcctgagcaaaaccgtcacccataaccagggcaactacgcggcgatgatggccgacaccattgcccggtataaagagggtaaaccagtgctctactacacctggacgccgtactgggttagcgacgtgctgaagcctggcaaggacgtcgtctggctgcaggtgccgttctcctccctgccgggcgagcagaaaaacatcgacaccaaactggccaacggcgccaactatggcttcccggtgaacaccatgcacatcgtcgctaacaaagcctgggcggagaaaaatccggccgccgccactctgtttagcgtcatgaagctaccgatcgccgacatcaacgccgagaatgcgatgatgcatgaaggccatgcttccgaagccgacattaacggccacgttgatggctggatcaaagcccaccagccgctgttcgacagctgggtgaaaaccgccctcgccgcgcagcagtaaacccgctcacggataaggcccagcgccttatccggtccccttgcccccctttctcgtggtcaggtcatagaaaagcgattccaggaatttccatagtgttaaggcgcatcgcgctctgttaaggtggagacatcggtcaaattgccaccttcacatggatccagcgataagttattcatatggaaaaccccgcgcccttaacctgtgccttacctgaacgtgtcgccaccgtcggcgaaggcgtcaaagacagtctccccatcgtcatcagctaccttccggtggcattcgccttcggactcaatgccacccggctgggcttcaccccactggaaagcctgttcttctcctgcattatttacgccggcgccagccagtttgtgatcaccgccatgttggccgccggcagttcgctgtgggtcgccgccctgacggtaatggcgatggatgtccgccacgtgctgtatggcccctcattgcgcagccgcattcgctcagcgctggataaaaagaaaaccgccctctgggccttcggcctgaccgatgaggttttcgccgccgctaccgccaggctggttcgcgataaccgccgctggagcgaaaactggatgctcggtctcgcttttacctcgtgggcatcgtgggtgtgcggcacgctggccggcgcctggtccggcaacggcctgctggtggattatccggcggtggaagccgccctcggctttatgctgccggcgctgtttatgagcttcctgctggcctctttccagcgtcagcagtcactctgcgtcacggcggcgctggcgggcgcgctgggcggcattttgttattttccattccggcggcgatcctcgccggaattgtctgcgggtgtctgacggcgctgcttcaggccatgctcaaggggatgccggatgaacagtgaagtccttctgctcggggtgatagtcggcggcgtcaactatctctttcgctatcttcctctgcgtttgcgcgtcggccacgcccgtcctgcccgccgcggcccggtcagcgtgctgctggataccattggcatcgcctcgatttgcgcgctgctggtggtctccagcgtgccggagatcctagccgatgcccatcgcctggcgccgacgctgaccggcttcctggtgctgggcgccgccttctggaaaacccgcagcatcattgtcccgaccctgctgtcggcgtttgcctatggtctggcatggaaaatcaccaacgggctctaagctttacgtatcaattttggtcaataattcatttgatttatttgtcacaatagttattatatcggctgtaattaatgaggtcatacccaaatggatagttcgtttactcccattgagcaaatgctcaagttccgcgccagccgccatgaagatttcccgtttcaggagatcctgttaactcgtctttgcatgcatatgcaaggtaagctgctggaaaatcgcaataaaatgctcaaagcgcagggaattaacgagacattatttatggcgctgattacgctggagtcacaggaaaaccacagcatccagccgtccgagctgagctgtgcgctgggctcgtcacgtaccaacgccacccgtatcgctgatgaactggaaaaacgcggctggattgagcgccgcgagagcgataacgatcgtcgctgtttgcatctgcaactgaccgaaaagggccatcagtttttgcgtgaagtcctgccgccgcagcataactgcctgcatcagctgtggtcttcacttagcaccagcgaaaaagatcagctcgaacacatcacccgcaaactcctgagccgccttgatcagatggaagaagaaggcgtgctagcggactctctacgctaagggcggcgtcgctcagcccatttttacgttgcaaggaaaacagccaggccagcagatctctgctggcctttctgataaacaggtcggctcagccgatgtgaaataataagatcgtggagaataacatgagtgcaaatgcggagagccaaaccccgcagcaaccaggcagcaaaaaaggaaagcgtaaaggcgcccttctgttgctgacattgctcttcattattattgccgtggcatatgggatttactggtttctggtactgcgtcactacgaagagaccgacgatgcctacgtggcagggaatcaggtacaaattatggctcaggtcgctggcagcgtgaccaaagtctgggctgacaacacggactacgtgcagaaaggcgatccgctggtcacgctcgatcggaccgatgcccaacaggcgtttgaaaaggctaagacccaactggccgccagcgtccgtcagacccgccagcagatgatcaacagcaagcagctgcaggcaaatatcgacgtcaaaaaaaccgccctcgcccaggcgcaggctgacttgaaccgccgcatcccgctgggcgccgcgaacctcattggccgcgaagagctgcagcacgcccgcgataccgtcgccagcgcacaggccgaactcgacgtggcaatccagcagtacaacgccaaccaggcgatcgtgctgggcaccaggctggaacagcagccggcggtgctccaggcggccactgaagtgcgtaacgcctggctggccctgcagcgtacgcagatcgtcagcccgattagcggctacgtttcccgtcgctcggtacagcctggcgcgcagattggcaccaccacgccgctgatggcggtggtcccggcgaccaacctgtggatcgatgctaactttaaagagactcagctggcgcatatgcgtatcggccagccggccaccgtgatcagcgatatctatggcgatgacgtgaaatacaccggtaaagtggtcggtctggatatgggcaccggcagcgccttctctctgctgccggcgcagaatgccaccggcaactggatcaaagtggtacaacgcctgccggttcgtatcgagctggatgaaaaacaactagcggaacacccgctgcgtatcggtctctcgacgctggtggaagtcaacaccaccgatcgcgatggtgaaatgctggccagccaggtgcggagctccccggtttacgagagcaatgcccgcgaaatcgctctcgatccggttaataagctgatagacgagatcattcaggccaacgccggataattcggggtgagtgtaatgcaacagcaaaaaccgctggaaggcgcgcaactggtcattatgaccattgcgctgtcgctcgcgacgttcatgcaggtgctggattccactatcgccaacgtggcgatcccgaccattgccggcaaccttggctcgtcgctgagccaggggacctgggtcatcacctcgttcggggtcgctaacgccatctccatcccgatcaccggctggctggccaagcgcgtcggcgaggtgaagctgttcctgtggtcaaccaccgccttcgccattgcctcctgggcctgcggcgtctccaacagcctgacgatgctgattttcttccgcgtcattcaggggatcgtcgccgggccgctgatcccgctgtcgcaaagtctgctgctcagcaactatcccccggcgaagcgctctatcgctctggcgctgtggtcaatgacggtgattgtcgcgcccatctgcggtccgatcctcggcggctatatcagcgataattatcactggggctggatcttctttatcaacgtgcccattggcgtggcggtggtgctgatgaccctgcagaccctgcgcaaccgggaaaccaaaaccgaacagcggcggatcgacggcgtcggtctggcgctgctgatcatcggtatcggtagcctgcaggtgatgctggaccggggtaaagagctggactggttctcctccaatgagattatcattctgaccatcgtggcggtggtggcgataagcttcctgatcgtctgggagctaaccgacgataacccgattgtcgatctgtcgctatttaagtcgcgcaacttcaccatcggctgcctctgtatcagtctggcctatatgctctacttcggcgccatcgtactgctgccgcagctgttgcaggaggtctacggctacaccgcgacctgggccggcctggcgtcggcgccggtgggggtgatcccggtcattctgtcgccgattatcggccgcttcgcgcataagctcgacatgcggcggctggtcaccttcagctttattatgtacgcggtctgcttctactggcgcgcctggaccttcgaaccggggatggactttggcgcctcggcgtggccacagtttatccagggcttcgcggtggcctgcttcttcatgccgttgaccaccatcaccctctccggcctgccgccggagcggctggcggcggcgtcgagcctgtcgaacttcacccgtacccttgccggctccatcgggacctcgatcaccaccaccctgtggaccaaccgcgaggcgctgcatcatgcgcagctcaccgaatcggtgaccccctttaaccccaacgcgcagcagatatacgatcagctgcagggcatgggaatgacgcagcagcaggcgtccggctggatagcgcagcagataaccaaccaggggctgattatctccgccaacgaaatcttctggatttctgcggctattttcatcctgctgttggggctggtgtggttcgccagaccaccgttcagcgccggcggaggcggcggcggcgcgcactaagcctcacataaagggacctccgggtcccttttttacggcgtcaggttgtccagttctcgctagtttctgtctcgtttgcgaaagcccgtcaccctgcgctcgggcaggataaaggctgaccattaaggagaacactatgctgagccatcctgctgaaaagtaccgtccctatccgccgatcgccctgcctgaccgccgctggccagaccggcaaatcagtcacgccccgcgctggctctcgactgacctgcgcgacggcaaccaggcgctggcggagcccatggacagcgcccgcaaactgcagttctgggatctgctgctggagtgcggctttaaagagattgaagtcgccttcccttccgcctcacaaaccgatttcaactttgtccgccagctgattgacgaacagcgcatcccggaggatgtcaccatccaggtgctgacccaggcgcgagacccgctgatcctgcgcacctttgaggcgctgcgcggcgcccgccgggctaccgtccacctctacaatgccaccgcgccgctgttccgcgagctggttttcggcatggacaaggccgaggtgatcgccctcgcgacccgcgccacccggcttatccgtcagcagtgcgaacagcagccggagacccgctggcaatatgaatattcgcctgaaaccttctgcttcaccgagcccgagtttgcgcttgagatttgcgaagcggtggcggatgtctggcagccctgcgccgagcgaccgatgatcgtcaatctgccggcgacggtggaagtcaacacccccaacgtctatgccgatcagatcgagtatttttgccgccacttctcccgccgcggcgaggtctgcatcagcgtgcacccgcataacgatcgcggcaccggcgtcgccagcgccgagctggcggtgatggccggcgccgatcgggtagaaggctgcctgtttggcaacggcgaacgcaccggcaacgtctgtctggtgactttggcgatgaacctctacagccagggcatcgaccctgagcttcgcttcgagcagatgaaccgggtggtggaggtggtggaaaactgcaaccagatccccgttcacccgcgccacccgtgggcgggaagtctggcttacaccgccttctccggctcccatcaggatgcgatcaaaaaagggtttgatgcccgtcagcctggcgatccgtggcagatgccctacctgcccattgacccgcaggatattggctgcagctatgaggcggtgatccgcgtcaacagccagtcggggaagagcggcagcgcctggcttatcgaacaaaatcatggtctgaaactgccccgcgggctgcagcaggacttcagccagcacgttcagcaggccaccgatagcgacggcaaagagatgacccaccatgcgctgtggcagctgttccgcacgcgctacgggctgcaggcgcagccggcgctgacgctgctcgattatcagagcgccagccagcaggatggccagctttccctgcaggcaacgctgcgtcaccacggcgaaacccgacgcctgcagggccagggcaacggcctgctctccgccgcagccagcgggctcagcgcgctgtttcggcagccgtttatgatcaaggactatcatgagcatacgctcggcgcgcgcagcgacagccggtcggtggcctatatccgctgcgtttttccgcaaggagaaagctactggggcgtgggtatcgataatgacgtggcgcgcgcctcgctgcaggcgctgtgcaatgcgctcagcgccgccgatcaggccgggggacgaaaatagtcgctgggggcgacgcccatcacccgacgaaacatggcgctgaaggcgctgtggctaccgtagcccagctccagcgccacccgcagcacggagtggccctgcgccaggcgcaccagcgcttccattagcttcgcccggcgcacccactcgctccacgtcaggctagtctgctgctgaaaatggcggtttagggttcgctcgctcatgctgcacgccttcgccgcctggccgctgctccaggcctcgcccggcgcctcgcgtacctgctggcacagccgacgcagcgtttcgctttgcggctccggcaggccaaacggcaggatcgccatcccgcggatctcatcgaggatcagttcataaattctttcgtcgcggctggcgggggcatagcgttccgccagcgccagggatgacacgatcagttcccgcagcagcggcgtgatctgtacgatctggcagcccgccggaagatcggcgcgcgccagcggatcgataaacagggtgcgcgccgccacgttgccggtcatgcgtagcgcgtgcggcgttcccgccggcagccagacgccgcgcccgggcggcaccacccagtagcctaccggcgtcgcgacccgcaccacgccgcttagtatatgcagcagctgggcgcagtcatgctgatgccagtcttcctggtcaccgtgggcataatcatgggcaaagggcaccagtgggcggtgctgaaaggagaaggaaagcgtcgtcgtcatcgcggcgtcagaagagcggcccggcgacaggcgtcgggccgtggcggaagcactagatgtgcagttcctgcagtttttctttcggcaacgccagttcgtcgttgctgttgatgcgcacatcgcgctcaatgatatggcgagcgatgtcctgggcctcttccagcgagtgcatggtgtaagtcccgcactggtagacgttgagctccgggatctggttctgatctttcaccttcagcacatcggccatcgccgctttccaggcgtcagcgacgcgctgctcgtccggcgtaccaatcaggctcatatagaagccggtgcggcagcccattggcgaaatgtcgataatttccacgccattcccgttcagatgatcgcgcataaagcccgcgaacagatgctccagggtgtggataccgcgttccggcatcacttcctggttcggtacgcagaagcgcagatcgaaaacggtgatttcatcgccatgcggcgtgttcattttcttcgcgacacgcaccgctggggcttccattcgggtatggtcgactgtgaaactatctaacaacggcattcgtcacctccgggagtgaatttttttaaaataaaatgaactctttgttcagccgcgagtctcagtatatgaaagacgcgcatttattatcatcatcatccctgaatcagagatgaaagtttggccacagtgatgtggcctttttcttttccagcgctacgcgtgccgcgccagcagcgcctcaaacggctcgctgtcttcagcttccactttcttttgtcgcgccaccgacgcgtcgcgctcggcgataaaatcgtcttcgctcaggatctccagcggctcttcgcgcagctgcgtccggtaacgatcggcaagcgcacggccggtaccgccaatgccttcttcaatcatagaacgcagaatgcgggctgagaaggttaattccggatcgtcaaagcaggccagcagctcgtcgcagacctgctgatatgcctggccaccgtggatactgtccagggtctgcgccacgcggcgtaaatcgcggaacagatctttgcccacctgagccagcgggaactgcgcgctttcgcagccaatccccagcgttaagcccggcttacgcccttccagaatcacccgattccagttggtgcgggtgcacagcagctcatcgctgctcatctccggcgcgtcggccagcgcgcaccagaccataaacaggtcgaggaaacgcacctgctgggcgtcaacgccgatcggcgagaacggattgatatccagcgaacgcacttcgatatactcaataccaccgcgcaacagcgcatcggacggggtttcgccccgacgggtgacgcgtttcgggcggatcggcgcataaagttcattttcaatctgcagaatgttgctgttgatctgcagatacttgccgtctttctgcagcccgattttggcgtactcttccgacggcgttttaatcgcccgcttcaatcctgccacatactcgtgcagatcgttaaacgtaattccgagattgctttgcgacttattggtataaccaaggtcgctgaggcgcagcgaggtggcatacggcaggtaatacatgccgttgcccgtttcctcaaagggcagcgttgtcggtttgccttgcaggaatgaggagcaaatcgccggcgaggcgccaaacagataggggatcacccagccaaagcgatagtagttacgaattgagcggaaatagcccgccgaaatggcctctttaccactctcggcatcttccacaccacattttgcctgccagaaggccatcggtagggagaagttatagtgcacgccggagatagtctgcatcagcgcgccatagcgattcttcagcccctcgcgatatagcgttttcaggcgccccacgttagaggtgccgtactgcgccagctcaatatcctgaccgggggcgatatagcatggcatgctcagcggccacatccgctcgtcgccaagctgacgcgcggtatagcgatggacatcgcgcataaaggtcagcatatgctcaatatcgccatctactggcgtaatgaactcaagtaaagcttcggcaaaatcggtggtaatccatttatgcgttagcgctgagcctaacgccggagggtgaccggtcgttgcaagggtgccgtctgcgttcacgcgcagcgtttcccgctccagaccacgttgaataccctgcagagcctgcggatgtttttccagccaggccagcgcctgtgatacgtccgggatcaatttgacctcccgcctgtcgaaatcgtttgaataagcataattgtaatggatgaactgtcagtccaattagtgccaccacgtcatgccctgaagcgtcgctgccgcaatagcgatatagcgcagcgccttaccaaggcataagaaaaagagtaccggtccccaggaaatgcgcatccatcccgccagcaaacacagtaaatcgccgacaaccggcgcccagctcagtaagagcgtgaccgcgccgtagcgcttaagccagccggccgcccgctcctgccagcgcgaggttttgcgcagcggaaacaagcgccccagaataacgttagttacccctccaaggctattgccgattgttgctattaatactaaccaccacggatgactgacccccgcaagtagcatagccaccagcacaacctccgaattgccggggagcagcgtggcgcttaaaaagctactggcaaacagcgaggtgagtgacagcgcgtcgctcacagcaaacgcacgtcaactgcgtccattcccgcgcgcttcgccgcctgcagaccaaagtcggcatcttcgaagacgacgcatttttccggcgcgacgcccatgcgctcggcgcacagcaggaaggtatcgggcgcgggtttatggttgaccacatgatcggccgccaccaccgcggagaagtaatgacgcagccccaggtgcgccagcagcgcttcggcgacggcgctctcgctgccggttcccaccgacatcgggcgacggccgtgccatgccttaaccacctcaatcagcggcaacgggcgtacgctgtccagcagcatcgctttgacggcctgggttttttcctgcgccaggcgatgtggatcgagatcggcctggttgagttcgataatcgcctgggcgattcgccaggttggtgagccattgagcgcgaccatcgcctgttcgtcgaaacgcataccgtagcggcccaacacctcgttccatgcctgccgatgggtcggctcggtatcgagaatggtgccatccatatcaaagatcagtcctgcgtaaccttcgtacattgtcttctcaccaaccggtttgggaatgattactgtaacgcaaaagcccgccgttgtcgcggccagcggcgcagacgacaaaggcgccctcaggcgcccccaaacattaggccggataaccagccttatttaatacgcagatcgttctcgaccattcgcacgccctgcactcggcgtgtgacttctacggctcgtttagcgctctccgcggaggagacaaatccgctcagctggacgcggcctttaaaggtctggacgctaatttctgaggacttaatgtctttatcgttaaagagcgccgttttcaccttggtggtcaccacggtatcgtcaatatagccgcccgtactctcctttgtagccgatcccgcacagccagcgagggccgtcgttaccagcagcgtcgcgcaaaaagcaggtattgctttgaaccatttcatggatttctctccttgcatttatctcagcctgataacgctgatatacaaggataaattatagtggaaagcgcgtcttgccaataaaaaagtcaggatgaagccagtgatggaaaacgaggtaatcgggatggtgagagaagagtgaagattatgcattcagaacgggtgctgcgataatttcgcagcctatgcaacaacatcgtcgttgttactgaggagaatatggtgcatccgggaggatgactcggctacgcctcgcccttcgggccgttgcttacgcaacgttatccccctggtgctggcgatgatttcgcagaccataaaacaacgtcgtcgctgttactaaggagaatatggtgcatccgggaggattcgaacctccgaccgctcggttcgtagccgagtactctatccagctgagctacggatgcatcgggaaagctattttactgcggggttactctcctggcacttacgatggtttcgcaaaccagataacaacaatgttgctgttactaaggagaatatggtgcatccgggaggattactcggctgcgcctcgccctacgggccgttgcttacgcaacgttatcctccctggtgctggcgataatttcgcagaccataaaacaacatcgtcgctgttatcaaggagaatatggtgcatccgggaggattcgaacctccgaccgctcggttcgtagccgagtactctatccagctgagctacggatgcatcgggattactgctgtaattctgatatcaaatttcgcgatttgccattcttattaaagaatggtgcatccgggaggattcgaacctccgaccgctcggttcgtagccgagtactctatccagctgagctacggatgcatcgggaaacttgctttactacgcgtcagtgtcacaactaacacatgccacactgagtatgatggcctaatcggtagagtgactcgattatgcctcgcactgcgggccgctgctttcacagcgctcttctctcttaattcagaaagaagatggtgcatccgggaggattcgaacctccgaccgctcggttcgtagccgagtactctatccagctgagctacggatgcaaaatggcggtgaggcggggattcgaaccccggatgcagcttttgaccgcatactcccttagcaggggagcgccttcagcctctcggccacctcaccacacacgcctctttcgagtgcttcgaagaacttgtttctgctcttcgtcgctgcgatggcgcacatattactttctggtacttataagtcaaacactttttcgagaccttttttcgtttgcacacttcgcacgcaattcgcgtgcaaaaacggcaaaaagggcaatttatcaacaggaaatcagccctgacgctggcataacgccaaacgaccaaagcggcaaagggtaatgaaaagcggtatggcgcagggggaaaaaacagaaaaagggaaaaagcggcggtaagtgatgcgcctcactgcacagcgaggcgcggaaaccttagtaactggactgctgggatttttcagcctgaatacgctggtagatctcttcacggtgaacagacacttctttaggggcgtttacgccaatacgaacctggttacccttcacccctaaaactgtcacagtgacctcatctccaatcatgagggtctcaccaactcgacgagtcagaatcagcattctttgctccttgaaagattaaaagagtcgggtctctcgtatcccggcattatccatcatataacgccaaaaagtaagcgatgacaaataccttagggtataagcagtcatggcatcacattctgttaaacctaagtttagccgatatacacaatttcaacccgactttatcgttatcagtgtttctgacgcaaggtgccgtaaccctctggttatggcacctatacccgtcatacttcaagttgcatgcgtgttggctttcctcgctcaccccagtcacttactagagtaagctcctgggaattcgctgcgtcgccgccttcctgcaactcgaattatttagggtaaatgcgtttatagttattacagttttgcgctgacccagcctttcacactggctaacgctgcagggagagcagacgcatcggtaccaccggcctgcgccatatccggacgaccgccccctttaccgcccacctgctgagcgaccataccaaccagctcccctgctttcacgcggtctgtcacatccttagacacacctgcaatcagagaaaccttaccatccgctaccgtagctaatacaacgatcgtcgaaccgagctggttcttcagatcgtcaaccatggtacgcagcattttcggctcaacgccggtcagttcgctgaccagcagcttaacgccgttaatctcttccgctttgctggagaggtttgcgctctcctgcgccgcagcctgctctttcagctgctgcagctctttttccagctgacgggtacgctccagcgcggcgcgaaccttctcgccgagattgtggctgtcacccttcagcagctgagcgatatcattgagctgatcgctctgcgcatgcaggatggccatcgcgccttcgccagtcaccgcttcgatacggcgcacgccagcagcggtgccggactctgacgtgatgcggaacaggccgatatcgccggtacgcgccgcgtgagtcccgccgcacagctccgtggagaagtcgcccatccgcagaacgcgcacgcgatcgtcgtatttctcgccaaacagcgccatggcgccggatgcgcgcgcggcatcgatatccataatgttggtttcgatagccaggttacgacggatctgcgcgttgaccaggtcttccaccgcacgaatttcttccggcttcatcgcttcaaaatgcgagaagtcaaagcgcagcgctttatcattgaccagcgaacctttctgcgccacatgggtgccgagcacctggcgcagcgccgcgtgcatcaggtgcgtcgcggagtggttgagacggatacgctgacggcgagcctcatctacgtcggcctgcaccgcgtcacccactttcagtgtgccgctggcgactttaccgatatgaccaatagcctggccgtacttctgcgtgtcgctgactgcgaaggagaagcccgcgccttttaattcgcctttatcgcccacctggccgccggactccgcatagaacggggtctgatcaaggatcaccaccgcttcctggccagcgctaacgctatccaccgctttgccgtcgataaacagggcggtaaccttgccgttcagctccagatgatcgtagcctttaaattcagaggcgccgtcaacgcggatcatcgcattatagtcggcgccgaaaccactggactcgcgcgcgcggcggcgctgctcttccatcgcggcttcaaaaccagcttcatcaaccttgatgttgcgctcgcggcacacatcggcggtcaggtcgaccgggaagccgtaggtgtcgtacagacggaaggcggtttcgccgtccagggtgtcgcctttcagcttcgacagctcctcatccagcagcgccaggccgcgctcgagggtgcgggcaaactgctcttcttcggttttcagcacctgctcaacctgagcctgctgctgcttcagctcgtcgccggcggagcccatcacatcgatcagcggggcaaccagtttccagaagaaggtgtccttcgcgcccagcatgttgccgtgacggatcgcgcggcgaatgatacgacgcagcacgtagccgcggttttcattcgacgggatcacgccgtcggcaaccaggaaggcgcaggagcgaatgtggtcggcgataacgcgcagcgacttgttcgtcagatcggtcgcgccggtgactttcgccacgctggcgatcagatcgcggaacaggtcgatgtcatagttggagttaacgtgctgcagcaccgcggcaatacgctccagacccataccggtgtcgacggacggcttcggcagcggctccatagtaccgtcagcctgacggttgaactgcatgaagacgatgttccaaatctcaatgtaacggtcgccatcttcttccgggcttcccggagggccgccccagatgtgatcgccgtggtcaaagaagatttcggtgcacgggccgcacggaccggtgtcgcccatctgccagaagttgtcagaagcaaacggcgcgcctttgttgtcgccgatgcggataatacgctcgcgcggaacgcctacttcattggcccagatgtcgaaagcttcgtcatcggtctcgtaaacggtaacccacagtttttctttcggcagcgcgaaccagttctcaccggtcagcagttcccacgcgtatttgatggcatcctgcttgaagtaatcgccaaagctgaagttgcccagcatttcaaaaaaggtgtggtgacgcgcggtgtaaccgacgttttccagatcgttgtgtttaccacccgcacgcacgcaacgctgtgcggtggtcgcacgcgaataattacgtttgtcgagaccaaggaagacatccttgaactggttcatccctgcattggtaaacagcagggtcggatcgttgtgcggcaccagggagctgctggcaactacctgatgtcccttgctatggaaaaagtcgagaaacgcctgacggatctcagcggtgctcttgctcataattatcctgaaatcaagctacacgtcatccttcaagtcgcctctgtcctggctgcgcttgctcttccggcaccgaactgacgtacgttgcgaaagagagtctctcttgccgccctgatgcagcttgaatgattttgtgtaaaggaataatcgcccaggccgctgcctgcacagtcacaaccagcggcccgacggaataaagtgggaataagataagttttctttacggcgaagtaaaatcccggatgggtcaatctgcaaaatttcgccagatttcctggatatcttccatcaggtagccgcggtaaagcaggaatcgctgaactttcactttttcagtaaaggcggaaggtaacggttcgccgtatttacgctgtgcctgctccctggcaaggctcacccagtcgatatcgcattcgcgcatcgcctggtcaacgacctggcgcgcaatgcctttctggctgagctcctggcgaatgcgcgccggaccatagcctttgcggctccggctggcgatgaactggccgacgaagcggttgtcgtcaaggtagcggttttcgatacaccaggcgacaacctgctccagctcgtcgggggtgacgtccagcgcctcaggaccgtttttgctcatcaccggagcgaccagcttgcgtcgcagctcctgctcgctgtggtcgcgcatcgccagaatgcggatagcacggtccagcaggcgggcgtagccggagcggcgtgatgaaggttcagtcacaggcacctcgataatctcacaaagcaaaagggctgcctaagcagccctgtcagtcttgcagacgatatcagaaatcctgttcggtttcttctgcgtcgttgccgtcaacaacgaagtctggcttcgcatcctgattgttgagcagcagttcgcgcactttcttctcaatctctttcgccgccgccgggttctctttcagccaggtgatcgcgttcgctttaccctgaccgattttgtcgccgttgtagctataccaggcacccgctttctcaatcagcttctcttttacgccgaggtctaccagctcgccgtagaagttgatgccttcgccgtagaggatctggaattcggcctgtttaaacggcgcggcgatcttgtttttcaccactttgacgcgggtttcgctgccgacgacattgtcgccctctttcaccgcgccgatgcggcgaatgtccagacgcacagaggcgtagaacttcagcgcgttaccaccggtagtggtttccgggttaccgaacatcacgccaattttcatacggatctggttgataaagatcagcagcgtgttggactgcttcaggttacccgccagcttacgcatcgcctggctcatcatacgcgccgcaaggcccatgtgagagtcgccgatttcgccttcgatttccgctttcggcgtcaacgccgcgacggagtcgacgacgataacatcaaccgcaccagagcgcgccagcgcgtcacagatctccagcgcctgctcgccggtgtccggctgagaacacagcaggttgtcgatatcgacgcccagtttgcgtgcatagacaggatccagcgcatgttcagcatcgatgaacgcacaggttttaccttcacgctgcgctgcggcgataacctgcagcgtcagggtggttttaccggaggattccggaccgtagatctcgacgatacggcccattggcagaccgccggcgcccagcgcgatatccagagaaagcgagccggtggagatggtttccacatccatggtgcggtcttcacccaggcgcatgatggagcctttaccgaattgcttttcgatctggcccagtgcagccgccaacgctttctgtttgttttcgtcgatcgccattgttactcctaatcatgcagggtaaagcgtgttcgcttcgccgttaatatttgttcagttgaggcaattatactgtatagtcatacagtatcaagtgttttgtagaaattgttgccagagcagatttagcgcataggccgtcgcctgacgacgcaccgcttcgcggtctccggcaaagcattcccgccgcgtcaccccttgcccgctcacgctggcgacgccgaaccataccgtgccgaccggcttttcgacgctgccgccatccggcccggcgacgccgctaacggagatggcataatccgcacgcgccgcgcgcagcgcgccaatcgccatctccaccaccaccggttcgcttaccgcgccgttgtcgcgcagcgtcgcttcgctgacgccgatcatttgcgatttagcttcgttgctgtaggtgacaaagccgcgttcaaaccacgccgagctgccggcaatatcggtgatcgctttcgcaatccagccgccggtacaggattccgccgtggtcaccgtcgccccacgcgccttcagcgcccggccaatcttctcgcttagctgcattaattctgaatcggtcattatcgccccgctttgctctggataaagaggccatcaaagatagcactttcgacagagatatggggatgaagcggcgattttacgaggggggatccagaaatgggtcgtcctgtgataaccaggacgaccagacaacctgttacttcatgctgttagcgataagctcaacgttgtgacgcatcattttgacgtaactatcggcgacgccgcccggcttagatagcgcttccggatagagttcgccccccggctgcgcgccggtggcgctggcaatctgcttcaccagccgcgggtcaagctggttctccataaaccaggtatggacgccatccgctttgatttgcttaatcagcgccgccacctgcgccgcgctggcctcgctctctgaagagagcccctgtggcgcgaggaaggtcacgtggtaagcccggccaaaatagccgaaagcgtcatggctggtcaggaccttgcgcttggccagcggaatggcgctgaactgcgctttcgcccagccgtcgagagacgtcagctggtcgatatagcgcttgccgctgctggtcaacgctgctttatcttccgggtcggctttcaccagaccatcgaggatattctgcgcatacaatgcgccgttcgctgcgctgttccaggcgtggggatcggtcaccgttttaccctcttcatcaagggtatgggtcttgacgcctttcgatgccaccaccagctcgcccttaaaaccagaggccttaatcaggcgatccagccacccttccagccccaggccgttaaccacaaccacgtcggccttgctgagcagcgcgctatccttcggagacggttcgaaggtgtgcggatcgccgtccgggccgaccagggtatccacatggacatgctccccgccgacctgctgcgctatatcacccaacaccgaaaaactgcttaccacattcagcgttttcgccatggccccctgcgccatcaggccgagggccagcgcgaccactattgcactacgtttcatcatttccttaccccatcaatgtgcgccaaccgaccagcagccggctgcgcgtgccaaaaaatagcgaaacaaaaaacagtgcgctggcggtcagcacaatagcgggcccggcgggaagactaatcgcccaggagaggcttaatcccagccaggcgcagagcgcgcccattcccgccgccagtagcagaatgcccggcagcgtgcgcgcccagcagcgcgcggcgaccgccgggagcatcattacccctaccgccatcagcgtgccgagcacctgaaacccggccaccagattaagcaccagcagcgccagaaaaagcccatgcagcagcgcaggcagccgccggtgattcacctgcagccaggcgctgtcgaacgcctcgctgaccagaccgcggtagcacagcgcaatgcacaatagcgtcaggctggcgacgccgctgacaaacagcgccgcatcgcggtcgaccgccagaatggagccaaacagcagatgcaggaggtccacgctggagccgcgcagcgacaccagggtgacgcccagggccagcgagcccagataaaatccggcaaaactggcgtcctcttttaacggtgtccgccggctcacccacccggccaccagggcaaccacgatgccggcgatgaagccgccgagggtcatggccagcagcgacatgccgctcagcagataccccaccgccacgccggggagaatggcgtgcgacagcgcatcgcccatcaggctcatgcgccgcagcagcaggaagacgcccagcatggtggtgctcagcgacagcgccagacacaccacgagggcccgacgcataaagccgaattcaatgaaaggctgaaagaaggtgtgccagatcatgccgacctcacatgactgaaggccgggagcaccgcccgggtagcgccccagcaggcgcgctggggagtcagcagcagcgtctcggggaaaaagtcggccacccgctggttatcatgcagcaccgccaggatggtctgtccctgccggtgcatctcgaggatcaaatccattagttcgcgactggtcgcttcgtcgataccggtgaagggctcgtcgagcatcaccagcggcgcctgctgcaccatcacccgggcaaatagcatgcgctgaaactggccgccggagagcgcttcgatcggcgttttcgccaggcccgccagcccgacccgctccagcaccgcgccgatgcgtcgccgggtgccgccccccagaccgcgcagcagcgacacgccgggccatgcgccctggcttaccacatcctgcacgttgagaggaaactgcgactcgagggcatggcgctgcgccagccagccgatcaccggccgttttccctgccagcacaggcggccactgaccggaggaagaaacccggcgagggttttcagcagcgttgattttccgcagccattgaggccaacaattgccgtcaggctgccggggcatatcatcccgctcagcggaggggtgatcgctaccccgtcatagccggcgaccagctgctccagttcaatcatggcagcgtcaccgcccaccaggttgctaaccatagcgccgccagcagcacgcctgcgatagccgcgcgcgccgcgccggatgccataaaaatcgatgtgaacatacccctgcctcaatttaatgttataacataacaataacgaagcgaagaaagaatgtaaatcagcgtcagtcagcggaaatgtaacaaaggtcaacaagaggcatggagacgggaaaaaacggggggataagcgcggcctccccggcgtcatcccccggtcgcgctgcgcttaccgtggctagcaaccggataccagaccgtaacccggataaagcgctggcgaactccgccgccaacgtgcggatgacggcgcgtaacgtagccgcagtgttgccgatgggcgacaagctgtcattgaactctcccccggtcgcgctgcgcttaccggggctagcaaccggataccagaccgtagcccggataaggcgctacgcgccgctatccggggaggctgggaaattgtcagccggatgaaaggattaataaccgccgcgggcctgcgcaaccgccaggcccagctgccagacggccatcgcgtagtgggtgctgtggttgtagcgggtgatggtgtagaagttcggcagcccgtaccagtactcatagccggtgccgacgtccagccgcagcaggctggcctgctgatggttacccagcggctgggtcggggtcagccctgcggccgccagctgcgaaacgctgtatttagtcttgaaaccattctccagccccggggcctgccccagcgcctgcaccgccaccagatcgccgctcacccagccatgctgtttgaagtagttggccacgctgccgatagcatccaccgggtcccacaggttgatatgtccgtcaccgttaaaatcgaccgcatactgcttataggaggacggcataaactgaccgtagcccatcgccccggcgaaagagcctttcagatccagcgggtcgtcgctttcgctgcgcgccattagcaggaaagtttccagctccgacgagaagtattcggcgcggcgcgggtagctaaacgacagcgtcgccagcgcgtcgaggatccgggttttgcccatcacccggccccagcgagtctccacgccgataatgccgacgatgatttccggcggcacgccgtaaacctgataagcgcggttgagcgcgtcctgatactgattccagaacaccacgccgttctgcacattatccggggtaatgaactgtttcttgtagcgcagccaggcgccggtcggcccggttggcggcaggccggtcggcgcctgacgatccatcagccgcaggacgtaatccaggcgctttgcctgcgacaggatctcctgcagctgctgcctgtcgaagccgtgcttcgccaccatcttatcgataaactgcgccgccgccgggttgttggcgaagtcgccgcccatctgcatcacgttatgctgcggttccagcaaaaagccgccggttccactcgccatctccgtttccgcgggggtcttgggtttgctgctgcaggcagcgaggagcacacaaaggggaagtaaagccagatagcgacgcttcaacatgggaattccgtttaacaaattcagcaagggataattatggtaaagcatgcgacgaccaacaagaaagcgacaatctgtttgtagacaaaatagtccttcaacggctcctcccgtgcgtgctttcatgccctgcaacatttcatctcgcccgcatcatctttcaaaataaaatatttatctttcattttgcgatccatctaacacttttaaacctttcaaaatgattaaaatcagcctgcgattagcaagaaaaataacatgctgaaggagagaacaatgattgacgtcgtgacccacggcgcggagtggtttatcggcctgtttcagaaaggcggcgaggtatttaccggcatggtgaccgggatcctccccttgctgatcagcctgctggtgatcatgaacgcgctgatcaactttatcggccagcagcggatcgagaagctggcgcagcgctgcgcaggaaacccaatctcccgctacctgctgctaccctgcatcggcaccttcgtgttttgtaacccaatgacgttaagcctcggccggtttatgccagagaagtacaagcccagctattacgcggcggcgtcgtatagctgccactcaatgaacgggctgtttccacatatcaaccccggcgagctgttcgtctatctcggcatcgccaacggcctcactaccctcggcctaccgctcggtccgctggcggtgagctacctgctggtcgggctggtgactaacttcttccgcggctgggtcaccgacctgaccacctcgattttcgagagaaaaatggcgattcagctttcccggaaagtgcatctgtcaggagcgacatcatgacccgtattcgtatagagaaaggcaccggcggctggggcggcccgcttgagctcgacgccgtcgaaggcaaaaagatcgtctatatcaccgccggcacccgcccggcgatcgttgaccgcatcgccagcctgaccggctggcagccggtggacgggtttaaagagggggaaccagcggaaagcgacatcggcgtggcaattatcgactgcgggggcaccctgcgctgcgggctctatcctaagcgccgcatcccgacggtgaatattcatgccaccggcaaatcagggccgctggcccagtacatcacggaagatatttatgtctccggcgtcaaagaggacaacatccagtgcatcgctcccgacagcgcaggggtttccgagccgccggcggaaaacaagagcgcgggtcgcgattacgacaccagcaagaagattactgaacagagcgatggcctgctggcgaaggtcgggatgggcatgggttcggtggtggcggtgctgttccaggccgggcgcgacaccattgatacggtgctgaaaaccattctgccgtttatggctttcgtctcggcgctgatcggcatcatcatggcctccggcatcggcgactggatcgcccacggcctggcgccgctcgccagccatccgctggggctggtaaccctggcgctgatttgctctttcccgctgctgtcgccgtttctcggccccggcgcggttattgcccaggtgatcggcgtgctgatcggcgttcaaatcggcctcggcaacattccgccgcacctcgccctgcccgccctattcgccattaacgcccaggccgcctgcgattttattccggtaggcctgtcgctagccgaagcccgccaggataccgtgcgcgtcggcgtgccgtcggtgctggtcagccgctttctgaccggcgcaccaacggtgctgatcgcgtggttcgtttccggatttatttaccagtaagaggttcctgcagatgactgtgatttaccagaccaccattacgcacatcggcgcctgcgcgacgatggcgctggaagagcaaatgctgatcaccttccgcgagggcgccccggcggatatcgaagagtactgctttattcacaaccacggcgagcttgctggcacgctgcagccgggggcagagctgcagcttggcgaacagcgctacccggtgaccgccgtcggcgaggtcgctgaacaaaacctgcgcgagctgggccacatcaccctgcgctttgacggccatcgtgaagcggagttcccaggtaccgtccatgtggcgggcccggtgccggacgccatcgcgcccggctgcgtactgaagtttgttgcttaaaaggagagagagatgaatcaggttgctgttgtcattggcggtggacaaaccttaggagagtttctgtgccgcgggctggccgccgagggctaccgcgtggcggtggtcgatattcagagcgaaaaagccagccgcgtcgcccaggagattaacgctgagtatggcgaaggtatggcgtacggcttcggcgccgacgccaccagcgaggccagcgtcaccgccctggcccacggggtggatgagattttttcgcgcgtcgacctgctggtgtacagcgccgggatcgccaaggcggcgtttattagcgacttcgcgctgggggatttcgaccgctcgctgcaggtcaatctggtgggctattttctctgcgcccgcgagttctcgcggttgatgatccgcgacggcattaaggggcggatcattcagatcaactcgaaatccggcaaagtcggcagtaagcacaactccggctacagcgcggcgaagttcggcggcgtcgggctgacccagtcgctggcgctggatctggcggaatatggcattaccgtgcattcgctgatgctcggcaatctgctgaagtcgccgatgttccagtcgctgctgccgcagtatgccaccaagctcggtatcgatgagagcgaagtcgagcagtactacatcgacaaggtgccgctgaagcgcggctgcgaatatcaggatgtgctgaacgtattgatgttttacgctagcccacaggcgtcgtactgcaccgggcagtcgatcaacgtcaccggcggccaggtgatgttttaacaggttcccggatggcgctgcgcttatccgggctacaaaactgtaggtcgggtaaggcgttagccgccacccgacaaaaaacggcaccgcgggtcgctcgggttaggcgctcgcgccgtgacctgggctgttcccgccccccttaaggagagacctatggttactgcattaatcatcgtcgccgccatcgcctggcttacccagctggcctttggcggctggcagatccgccgcttcaatcgcgcctttgatagcctgtgccagcaggggcgggtgggcgtcggccgctccgccgggcgctttcaaccgcgcgccatcgtcgccatcgccgtcgatgataacgaccgcattagcgacacgctgctgatgaaaggcttcaccattttcgccagtccgcaaaagatcccggctctggcaggcaaacatattgcggaattgcagcctgatgtgatctttccccatgatccgcgctgtcagaatgcactatcattagcgcttaatccgaaacatggataatttcgttgtaaaagtaaatatcttgcgaaattatcacttcgaaacttaaacgcaggatagacgcctatgaaaccacgtcagcgccaggcagccattctcgagttcctgcagtcgcagggaaaatgctcggtcgaagagctggcgcaacacttcgataccactggcaccaccatccgcaaggatctggtcacgctggaaaacgccggcaccgtcattcgcacctacggtggcgtggtactcaacaaggatgaagccgatccgccgattgaccataagacgctgatcaacacccataaaaaagcccagattgccgaggccgccgtgcgatacatccacgatggcgattcaattatcctcgacgccggcagcaccgtgctgcagatggtgccattgctgagtcactttaataacatcacggtgatgaccaacagcctgcatatcgtcaacgcgctatcagagttcgataacgagcagaccatcctgatgccgggcggcaccttccgtaaaaaatcggcctcttttcacggccagctggcggaaaacgccttcgaacagttcagcttcgacaagctgtttatgggcaccgacggtatcgatctgaacgccggagtcactacctttaatgaggtctataccgtcagcaaagcgatgtgcaacgccgcccgcgaagtgatcctgatggccgactcatccaagtttggtcgtaaaagtcccaatattgtctgcggccttgaacgcgtggataaattgattaccgatgccgatattgacccggaattccagcgggcgctggaagccaaaggcattgaagtcattattactggagaacatcatgagtaactttttgttagaggccggacgccagaccctgatgcttgagctgcaggaggcgagccgcctgccggagcgcctgggcgacgacttcatccgcgcggcggaaaccattatccactgcgagggcaaactgattgtctccggtatcggtaaatccggccacatcggtaaaaagctggcggcaaccttcgccagcaccggcaccccggcctttttcgtccatccggcggaagccctgcacggcgatctcggcatgctcgatagccgcgacgtgatgctgtttatctcctactccggtagcgcgaaagagctggatctcatcgtgccgcggctggaagaaaaaggcattccgctgctggcgatgaccggcaaatccacctcgccgctggcgctggcggcgaaagcggtgctggatatcgccgtggagcgcgaggcctgcccgatgcatctggcgccaacctccagcaccgtcaacacgctgatgctgggcgacgcgttggcgatggcggtgatgcaggcgcgcggtttcaatgaagaggatttcgcccgttcccacccggcgggcgccctcggcgcgcggctgctgaacaaagtgcatcacctgatgcgtcgtgatgaagaagtgccgcgggtcaataccgaggctaacgtcatggacgccatgctcgaactaagccgaaccggactcggcctggtggcggtctgcgatgaagccaaccgcgtgcagggcgttttcaccgacggcgacctgcgccgctggctggttgctggcggtacgctcaacgatggcgtcactcgggcgatgacccgcaacggcgtaacgctgcaggcggatagccgcgcggtggaagccaaagagcggctgatgaaacacaaaatcagcgccgcgccggtagtggatgagaacggccaactggtcggcgccattaacctgcagaacttttaccaggcggggatcctttaagccccagacgtttcgccagccgatgcaggttggcgacgtccagttccagcgctcgggcggtcgccgcccagttgccctggttcgcctccagcgcgcggctaatggcttctcgctgaaaagagtcggtcgcctcgcgcagattgatgtttcccgtcgcgggcgccgctgccgccgtctcagtcggcaacatcggcgccgccaccgcaaactggaaatgctgcggctccaggaccacttcatcaccggcctgggtggcccgcgccagcaccaccgcccgatggatagcatgctccagttcgcgcacgttgcccggccaggaccactgctgcagccggtttcgcgccgcctcagccaaaatgacccgcgccagccccatccgcaggcggcactgctcgcagaaatagcccgccagcagcaccacgtcactttcccgctcgcgtagcggcggaaccgacagcgggaagacgctcagccgatggtacagatcggcgcgaaagcgcccttccaccacctcctggcgcagatcgcggttcgtcgccgccagcacccgcacatcgacccgcaggctgcggtcatcgccgacgcgctgaatatcgccatactgcagcacgcgcagcagtttggcctgcagcgccagcgacagttcgccgatttcgtcaagaaacagggtgccgttatccgccatctcaaatttaccgctgcggttgctgatagccccggtaaatgcccctttcacatggccgaacagctcgctctccgctacgctttccggcagcgccgcgcagttgaggtacaccagagggttggcggctcgcggcgacccctgatgcaccgccttcgccaccagctctttgccggtgccggtttcgccgctgatcagcacgtttaaatccgaggcggcgacgatatcgatctcttttttcagctgcagcatgggccccgacaggccgatgatctcctggcgctccggcagcgggtaattcaccgcctgcgccggcaggacgttttgcgcttcaaggcgggcgataagcagcgcattattcagcgccccggccaccagcgcggcaatcagccgcagctcttcatcgctgaagctatcgaaacgatcggcatccatgccgtccagggtcagcgcgccaatcagcgtctgcccggcaaacagcggcagtcccacgcaggcatggactttgaggctctcatgaccggggatcagcccgtcataggggtcgggcaggtcgctatccgccgggaagcgcaccacatcgccggcgcgcgcaatcgcctccagccgcgggtgtccttccagggcaaagcgccgaccgagcacatcctgcgccaggccatcgatcgccagcggcacaaactgatgcgcctcatagcgcagcagcgccgaggcatcgcagccaagaatttgccgcagggtagtaatcaggcgcgaaaagcggtcggtgtgaccaatatcgctttgtaaatctatggcgattctcgccagctcgtcgacggaaaaactcattgccgctccattgtcattttgacaatacgcattatcatatcgactattttaaccattgtcattttgacaacaaccaaaatcagaaaaaattaaaaatagataattatcaatgaattaaaaagttggcacgcaacttgatataagccagtcaactgagtttaaacacactgtattgattgaggttgctatgtctattgtggtgaaaaataacattctttgggttggccaacgtgactgggaagtgcgtgatttccacggcaccgaatataaaacgctgcgcggcagcagctacaacagctatctcatccgcgaagagaaaaacgtgctgatcgataccgtcgatcataaattcagccgcgagttcgtacagaacctgcgccgcgaaatcgacctcgccgacctcgactatatcgtcattaaccacgccgaagaggaccatgccggcgcgctgaccgaactgatgatgcagatccccgatacgccgatctactgcaccgccaacgccatcgactcgatcaacggccaccatcatcatccggagtggaacttccacgtggtgaaaaccggcgatactctcgacatcggtaacggtaaacagctgatcttcgtggaaacgccgatgctgcactggccggacagcatgatgacctacctgaccggcgacgcggtgctgttcagcaacgacgccttcggccagcactattgcgacgaacatctgttcaacgatgaagtggaccagactgaactgtacgaacagtgccagcgctactacgccaacatcctgacgcccttcagccgcctggtgacgccgaaaattactgaaatcctcggtttcaacctgccggtggagatgattgccacctcccacggcgtggtctggcgcgataacccgacgcaaatcgtcgagaaatacctcgagtgggcggcggattatcaggaagatcgcatcaccatcttctacgacaccatgtccaataatacccgcatgatggcggacgccattgcccaggggatcaccgaggttgacccacgggtagcggtgaaaatctttaacgtcgcccgcagcgacaaaaacgacatcctcaccaatgttttccgctcgaaaggcgtacttgtcggcacgtccaccatgaacaacgtgatgatgccgaaaatcgccgggctggtggaagagatgaccgggctgcgttttcgcaataaacgcgccagcgcctttggctcgcacggctggagcggcggcgcggtagaccgcctgtccacccgcctgcaggatgccggctttgagatgtcgctgagcctgaaagccaaatggcgcccggatatcgacgcgctggagctgtgccgccaacacggtcgcgacatcgcccgccagtgggccctctcgccgctgccggttgctgaagcagcgacaacgccggaaccacaggactgcgcctgtgccgccgccgcggccgccgatctcggtcccatgatgcagtgcagcgtgtgccagtgggtctatgacccggcgaaaggcgaacctaaccaggatgtacagccgggtacaccgtggagtgaagtgccggacaatttcctctgccctgagtgttctcttggcaaagatgtctttgacgtactggcgacggaggcaaaatgagtgatggcatcgtcatcatcggctcgggcttcgcggcccgccagctggtgaaaaatattcgtaagcaggatgcgcaaatcccgctgaccctcatcgccgccgatagcatggatgaatacaacaaaccggacctcagccatgtcatcagccgcggacagaaggccgacgatctgaccctgcaaagcgccggcgagttcgccgagcagtacactctgcgtctgtttccccatacctgggtaagcgatatcgacgccgaaaaccggttagtgaagagccaggataaccagtggcgctacgacaaactggtactggccaccggcgcgacgccgtttattccgccggtgccggggcgcgagctgatgctaacgctcaatagccagcgcgaatatggcgcggcgcagagccggctgcacgacgcgaagcgcgtgctgatcgtcggcggcggcctgattggctgcgaactggcgatggatttctgccgcgccggtaaagcggtaacggtagtcgataactccgccagcgtgctggcggcgctgatgccgccggaggccagcagccgcctgcagcatcggctcaccgagatgggcgtacatctgatgctgaaaacgcagctggaggggctggagcaaaccgccgacggcattcgcgtcagtctcgatcgccagcgcgcgataaccgtcgatgcggtggtggccgccgccggcctgcgcccggaaacgtcgctggcgcgccacgccggactgcagattaaccgcggtattgtggtcaatagccagctgcaaaccagcgacccggcgatttatgcgctcggcgactgtgcggaaatcaacggcgtggtactgccgttcctgcagccgattttactcagcgccatgtgcctgagtaaaaatctgctggcgcaggcgggagaactcaagctgccgccaatgctggtgaaggtgaaaaccccggatctgccgctgcatctggccggcgacacccgccgcgacgatctgacgtggaatatcgtggccgccaaagaggggctggtggcgaaaggcgtggatgccgaaaaccagctgcgcgcctttgtggtgagtgaagacaaaatgaaggaagcctttgcgctgctcaaacaactggtaagttgatggttttcccggcttgcggcgtaaacaccttagccgggctacggtattgtcctggtagcccggctaagcgcagcgcaagccgggaacatatccagcctagcgcgccagattgtcgtagccgcgccagcgatagttaagcaccgatagcgcccaacaggcgacaaacaacccgaccaccacaaatccggcgtcgccgaggttgtcgtttaacgcccctacccagcgccatattccgccgctgagcgcaaacttatccatcagcagacccagcgcttccaggccgccgataaacagcgctaccaccaccgaggtaccggtgatggtcatgttgtaatagagcttgcgctgcggcttgctgaacgcccagccgtaggcgccgaccatcagcacattatcaagcgtatccaccagcgccataccgctggcgaacagcgccggaaagaccataatcgaccagacggaaatcccgctcgacgcgccggcggcggagatacccagtacgccgatttcggtggcggtatcaaaaccgaggccaaacaggaaaccgaccaggtacatctgccagctgcggcttatcagacggaaggtcttgccaaacagccagctcatcaccccgccgccgctgacgatttcgtcgctcaccggctccccgcgcttccatgcccgaaagctgcgccacacgctgcgtaaaatcaccaggttgataaaggccatcgccagtaaaaacagggccgacacggcggtgccaatgacgctgccggtatcatgcagccagctcatctgcgtgctgaaggcggtggcggtcgcggcaatcgccgccgaggccagcaccacaatcgatgagtggcccagcgaaaaccaagccccgacggcgaaaggccgccgcccctgctgcatcatcttgcgggtcacgttatcaatcgccgcaatatggtcggcgtccaccgcgtggcgcaggccgtagccccaggccagcaggctggcggccatcagcgcgccgctgtcgccaaaggcctgcagcgcccagcaccaggccagtaaattcgccgcgatcaaccccagcaccagacccgcggcgcgcggctgctggcgtaaaactgtcattatcatggttgtattccttgagcctgcccgcgggcggcggcgatcaccgcctgaccataggcgattgcgccgtcgccggccggcaactgctgtgcaaacagcagagtaaaatccgccagataaaaggtcaatcgcgccgccagcaggcggttatgcagcaccccgccgctgcagaccatcgtgtcgatgccgcggacggtggcgcagtcgcgggccatcgccgccagtccacaggccagggcgtcgtggaatgcccaggctttctgcgccggagtcgcctgccagctcagccattgccgccagaaggtcgctaaatccagcgcgtcgtcgcaccacggcagcgtaaccgggtggctgacgccggggcagctggcggccagcgcctccagccgacaggccgcttcgccttcatagctcagactctccggcgcgcaatccagggcgcaggcaacggcatcaaacagccgtccgcaggatgaggcgcgcggcgcgttaatgccacgatcgatggcctgcgccagcagcggccagttgcgctggcgcaggggggcggcctgcggataatcctgccagtcagggacaaaggccaaacagtgggccagcaaatttcgccacggctggcgtgccgccaggtccccccctggcagcgcgacggccggcagcccgccaagatgttcgcattcgcgatagttgacccgcaggcactccccgccccacagcgcgccgttctcccccataccaataccgtcgagtgtcagggcgataacgtccccgccgtcaagcggccagcggtgctccgccaggcatgccgcggcgtgggcatggtgatgcagcactgtctccagcggcaagggcagggaggccgcccactgcgttgagcgatagccgggatgggcatcaaccaccacccgctgcggcacaaacgcgtaaatgctctgcatcagctgcagggcgctgcgccactgctgttcaacaccttcctcgccaagatcgccaaagtgctggctcagcaccgcttcgctgccgcgcgccaggcagaaggtatttttcatatccgcgccgagagccagcagcggcgggatgtctcctagccccggcggcagcggcagcgcgtccgggacgtagccccgggcgcggcgcagcatttcaccgcttgagcgcaccagtgaatcatccatccgctgtacgatgtcgcgattatgcaagagaaagccgtcggcaatgtcggctaactcattgagcgcctgagcattacttaacgtcggcggacggccgctaaggttgccggaggtcattacgatggggcgcgccaggccctgcagaagcaaatgctgcagcggattagacggcagcatcaccccaacttccgcaagccctggcgcaatctcgtcgcacaggccggagacctgcgctttagcaatcagcacgatgggcgccgccggggagcccatcagcgccgcggcgtcggcgggtaagcccgccgctgacggcaacatcaccgccagcggtttcgccggacggtgttttcgcgcccgcagcgtggcaacggctgcggaattaccggcgtcgcaggccagatgaaagccgccgatgccttttatcgccacaatgtcgcccgccgccagccgggcgatagccgcctgcagcgccgcctcgccgtccagcgtttccccctctgcccgccattccagtcgcggcccgcagtcgggacaggccaccggctgggcgtgaaaacggcgatcggcaggatcgcggaattccgcctcacaaggggaacagagcgggaacggcgccattgcggtgaagggccggtcgtagggcatggcgcgaataatggtcagccgcggcccgcagtgggtgcagttgataaaggggtagcggtagcggcgcgcccggggatcgttcatctccgcgaggcacgccgggcaggtcgcggcatcgggcacgatctgagtgcgcatccgtcccgtcccgctctcgcgaatggtgaaatcctgcggcagagccgcccagcgatagggggtgcagtcggtactgtcgatccgcgccagcggcgggcagtggtcagccagagcggcagtaaaaccgtcgtcgcccccgaccagccgcaccagtacgccgtcgccgtcgttacagacatcgccgcagcgggcctgcgcccgggccagctgccagacaaaggggcggaaaccgaccccctgcactttgccgcgaatgcggatttgcaccccgttcatacccggtgttaccaggccagcgccgtacggcgacgtttctcgatattcatctgctcaagtttgttgcggtcaacgcacaccagggcatgcgtcgggcagacttccatgcaggccgggccgctctcgcggtggaagcagagatcgcacttgttggcttcggctttttccgccacgacgttcagtccggcgccgctatggcggatcaccgggcgcaccaccacctccatcgccccgtacgggcaggcgacgacgcaggttttgcagccgatgcaacgctcctgcatcacatggacaaagcctttatcgcggctgatggcgccgttcgggcagacattggcgcagggggcgtcttcacactgacggcaggcggtcgccgtggaaacattgacccctttgatcacgtgaatacgcggctgaaaggtgtgaggcgtcagggaggcgcagtcctgatgttcctgatgggataccacgcaggccacttcgcaagtgcgacagccgatacatttgctcgcatcggcgataatgaaacggttcatccatttctccagcagtaagaaggttacgcgccggagtatgcataatacgttccaagtttttaatatattgattataaagactattatagctgggctttgctgtcatcgtcagtagtgacgatgacagctgacgacgtcaggcacaggggcccgccaccagcgactcgcgttcaatcagcgctccgggaaagctttgctgaaagttgaattccccgccatccagcataaagatcagccgattgatgctctctttaatcatctccgtcaccggcacccggacgctggcgagcgacggcaccatatacggcgcaagagcaatatcgtcaaaccccaccaccgagacctgttctggcaccttaacgcccagctggtgaagctgcttcatcgccccgatggccatatcgtcattgctcgccaccagcgcgctgtaggtaaccccgcgctgacgcaggctctccacccccgccgccccggtttccggcgtccagcgcccttcggcgataagcgcctcgttcagggcgatgccgtggccagccagcgcgtctttgtagccggcgaggcgttcgacgccggtgggagagtcaagggagccggtaataaaggcgatatcgcgatggccaagcgcaatcagccgctccactacccgcatcgccgaggctttttgatcggaccagacgcagtggctggcgtggcggcgcaggcggcgattaagcaccatgatcggctgcgagtggttctcaacgatctcgtccatctcatcaacggtgagaaagcgcgggtagatgatgatcgcatcgcagcgcagatccagcaggtactggatcgcctcccgctcctcttgcgcgctgtgcttgccgtcggccaggatcagctgccgccctttatcctccgtcatccgcgccacgtgatacagcagttcgctaaaatagacgccgtggtacagggtattggtcaccaccaggccgagggtttgcgtggttttggtcgccaggttgcgcgccagcagatttggccggtagccgctctccgccaccgccttaaacacccggtctttggtctcctggctgacatagccgttgcccgacagcacccgcgaaacggtcgccttcgatacccccgcgcgctttgcgacctccagcatcgttgccatgtgattcttcctgttgcaaaagttgcaggcagtgtactgcacgtttcccgcttttacagcactcccctgttcaccaccgcgatccggctcacggcgacgcttagcgatcaaaatcacaaaattgagatcatatttttttatttcttgtgcaattaaatgaaactcaccatgattttgtggaaccggtttcctataaaaacatggtatcgcccggcgatgcggggcggtggcagattagtaccctattgataaacaggataaaatccgatgtcgaaaaattatgcagccctggcgcaacagatagtcgcggcaatcggcggggtcgacaacgtcgccgccgttacccactgcatgacccgtctgcgcttcgtggttaaagacgacgaacaggtcgatagctctaccctgaaaggcctggccggggtgctcggcgtcgtgcgcagcgataaccagtgccaggtgatcatcggcaacactgtctcccaggcctaccgcgaggtggtgaatctgctgcctggcgacctgcgcccggctgagccgcagggcaaagcgccgctgaccctgaaacgcatcggcgccgggatcctcgacgcgctgatcggcaccatgtcaccgctgatcccggcgattatcggcggatcgatggtcaagctgctggcgatgatcctcgagatgagcggcgcgttgccgaaaggctcgccgacgctgaccctgctggcgcttatcggcgacggcgcatttttcttcctgccgctgatggtggccgcctccgcggcggtgaaattcaaaactaatatgtcgctggctatcgccatcgccggggtgctggtgcatcctgggtttatcgaattgatggccaaagccgcccagggagaacacgttgaattcgcctttattccggttaccgcggtgaaatacacctacacggtgatcccggcgctggtgatgacctggtgcctgtcgtatatcgagcgctgggtggatcgcattaccccggcggtgacgaaaaactttctgaagccgatgctgatcgtgctgatcgccgccccgctggcgatcctgctgattggcccgctgggcatctggatcggcagcgccatttccgcgctggtgtatacgatccacagctatctcggctggctgtcggtggcgatcatgggcgggctgtggccgctgttggtgatgaccggtatgcaccgcgtctttacgccgaccatcattcagaccatcgccgaaaccggcaaagagggtatggtgatgccatcggagatcggcgccaacctgtcgctcggcggctcttcgctggcggtagcgtggaaaaccaaaaacccggagctgcgccagacggcgctggccgccgcggcatcggcgattctggccgggatttccgaaccggcgctgtatggcgtggcggtgcgcctgaagcgcccgctgatcgccagcttaatcagcggctttatctgcggcgcggtggcaggtattgccggactggccagccattcgatggcggcgccggggctgtttaccagcgtgcagtttttcgatccggccaatccaatgaccatcgtctgggtgtttggcgtgatggcgctgtcggtggtgctgtcgtttgccctgacgctgatccttggctttgaggacattcccgttgagcaggccgctgccgacgccagagcgcgccaggcccgggcccaggcatcccacgcctgaatacactattgataatgaggtaatgcatggagagtttcccacagggatttttatggggcggcgcactggccgccaaccagtctgaaggcgcttatcttgaaggcggtaaggggctgaccaccgtggatacccttccccacggcgcgcatcgcctgccggtaaaattaggcctggagaagcgctttacgctgcgtgaagacgaattttaccccagccaccaggcgatcgatttttaccatcgctataaagaagatatcgccctgatggccgagatggggttcagcgtctttcgcacctccatcgcctggagccgcctgttcccacgcggcgacgaacagcagccgaatccgcagggcatcgccttctatcgctcactgttcgaggagtgcaaaaagcacggtatcgagccgctggtcaccctgtgtcatttcgacgtgccgatgcatctggtgatggagtacggctcctggcgcaaccgcaaaatggtggattttttcagccactacgcccgcacctgctttgaagcttttgacggcctggtgaaatactggctcaccttcaatgaaatcaacatcatgctgcacagcccctactccggcgccggtctggtgtttgaggagggagaaaatcaggagcaggtgaagtatcaggccgcgcatcacgagctggtggccagcgcgctggcgacgaaaatcgcccatgagattaacccgcaaaatcaggtcggctgtatgctggccggcggtaatttctacccttactcctgcaagccggaagatgtatggatggcgctggagaaggaccgcgaaaacctgttctttatcgatgtccaggcccgcggcgcctatccggtgtgggccgcgcgggtgttccgggaaaaaggggtcacgattgcgaaacagccgggcgatgacgagatcctcaaaaacaccgtcgatttcgtctcctttagctactacgcgtcgcgctgcgcctcggcggagatgaacgccagcaacaccaatgccgccaacatcgtcaagtcgctgaagaacccgcacattccggccagcgaatggggctggggcatcgacccgctgggcctgcgcatcaccatgaacttgatgtacgaccgctatcagaaaccgctgttcctggtggaaaacgggcttggcgcccgcgatgagatcgatgccaatggggacatcaatgacgactatcgcatcagctacctgcgcgagcacatcagggcaatgcgtgacgctatcggcgacggcattccggtgctgggctacaccagctggggctgcatcgatctggtctcggcgtccaccggcgagatgagcaagcgctacggctttgtctatgtcgatcgcgacgatgccggcaacggcaccctggcgcgtaagcgtaaaaagtcattcttctggtaccagaaggtgatagccagtaacggcgccgatctcgactaagcaccctcgcccacgcgcgcccgttccccgcgctaaccgggggacgggcgtcggctatctgttgcatccattacatgcttttttctcgagcctgattccagcttctggtttgccacctgtttacaataactggtattttatccagtacttttaccggggtatcttcagcaaggagcacatcatgagcgcacagcaccctaccgcagccagagggatagccagggccattcgccagttaaccgtgggatatgtcagaaaacgccatgaggaccgcaaaacgcgggagacgcggcgctacacccgccacgcggcattaagcttaaacggcgactggctggagcaggcggggtttccggtcggcacgcaggtcagagtctcggtgtcgcccggtaaattagtgatagagaatcttgaactggcagcgccgggaacggggctcccttccggccagtcgtgcgccggcggagagcccggttcgccgcagggctagtcgtccgcggcctccagctgagtaaagccgccctggccctgccagcctgccagctgctgatacacccgggcaacggcctctttcaccggctgggtcatcggataataaaaaccgacgatatccggctgaatgccgaggaaaatcacctcgccgacgtcttctttcagctgatcgaccagatagttgagcggcatgttatgggtggtcatcataaacatctcggcgatgtcgtcgggatcgatgatgcgaatgtcgccggggtttaggcccatatcggtggcatcgacaatcagcaggcgttcggggcgtaattcgcggatcgccacgatgtcgttttccggcgcgctgccgccgtcgatgaccacccactggccggccgggttagccgcgcacatctccgccagcagcgggccggcgccgtcgtcgcccatcatgctgttgccgacacagagtaaaacgtcagtcacgtaatctcctcaccatcaggtagatggcgctctcctggtgaatatcatgcagcatgctgagcagggttttgctccacgcctgctgctgcggggtctgcgcggactgcgctttatcaaaggcgttggccagcatcgccacatgactgctgtcgatgacgatttcgccatacttcggcacgccctccattttgcgccgcgcggcgcttccggcctcaagggtggcgatccatgccagatacgcgtcccacgggcagctcagcgccgcctccagacagtcgatgacgccgaggtggtggccaatcgccaggctgtaatagaccacctgctgcgcctgatccggcgtggcgtcgttctcatcaataaatttacggctcagctgactgaacaccaccgtctcgctcatcggatacgcgccccctcgaccacctggttgagatgggtgacgatctcggtcagacgcggatctttctccgcctccagccagcgcagcacctggctgtcgccctggccaagcagacgcatatagtcatcggcaatctgccgtccatagcggtagcccgccagacgccgcgcttcgcgatcgatgcgcacccgcagagtctgcaccatatcggcatgcagcagctcggtcggctgttcgtcgagctcacccggcagacgggcatgaattttctgctccagcaggccaagcgccatggcgaagccgtacagcgtggcggctggcgtcggcgggcagcccggaatatagacgtcgaccggtacgattttatcggtaccgccccagacgcagtacaggtcgtggaagatgccgccgctgttgccgcaggcgccgtaggagatacagatcttcggatccggcgccgactgccaggcgcgcagcgccggggagcgcatcgcgcgagtcactgccccggtaaacaacagaatatcggcatggcgcggcgaaggcaccaccttaatcccgaagcgttcagcgtcgaacagcggcgaaagggtggcgaaaatttcgatttcgcagccgttgcagccgccacagtcgacgcggtagacgtaggccgaacgtttaatcttcttcagtagcgaggccttcatgctggcgatggattcatccaccgtcatcggcacgggaatgccgttttcatcgcgcgggccaagtaaagtactcatcagctggcctccctcatatggcgggtcagttcaatacgatcggacggcaccaggcatttctggcgcttgcattccgggcaggtttcgaagctttcgcggtgcagctcggcgcgggtatcgccgttatgcttgagcagcgcgatggcgtagtcgatctccttctgcaccgcgaacggacgctggcactcccggcagtggcagatagcgaagcgcgactgctggaggaaatcctctttcttccacaccgccagttcatactccggcgacagcttaatcgccgccgtcgggcagacctcttcacagcgaccgcagaagatgcagcgcccgaggttaaactgccacgccagctggttagtggccagatcgatctcgaccgtcagggcgttcgacgggcaggcgttcacgcaggccgcgcagccgatacactgctgtggcgtatgctccggcttgccgcgaaagtttttgtccaccggcatcggctccagcgggtaggcgtgcgtcgcggtgccggtcttaataacttttttaataaaggtaaacatggcgattccttatttcagcggcgagtttttacgctcgatgctgtagcgctccagctctttgtatggcaccactttgctcttcttcttgcgtacatcgaccacggtcatgcggtcagtacaggagtagcacgggtcgaggctgccgatgatcagcggcgcatcggaaacggtgttgccgcgcagcatatagcgcagggtcggccagttggcgtaagtcgccgcccggcagcgccagcggtacagtttctggttgtcgccggtcatgctccagtggatatcgtcgccgcgcggcgcctcggagaagcccagcgcgaagcggtgcggaatataggtgaacccctccaccatcagcgggccgcccggcaggttatcgagaccgaaatcaatcatattcagcgcggtgtaaacctcgttgatccgcaccttgaggcgagatatcacgtcgcagccctgctcgctgtggacttccatcggcagcaggccgtaaccgacaaacgggtggtcggcgcgggtgtcgcgggcgtggccgctggcgcgcaccatcgggccgacgttgctgaagtcgcgggcgatttccgggtccagacggccaataccgacggtacgctgttccatattcggcgtgctgagcagcatatccaccagctcctgcacgtcgcgacgcatctgctgcgccagctgacgggtctggatcatgtcctctttcagcaggtcgcggcggatcccgccgatcaggttcaggccgtaggttttacgcgcgccggtaaggatctctgccatcttcatcgaggtttcgcgcacgcggaagaactgcataaagccggagtcaaagccggtaaagtggcaggccagaccgaggttcagcaggtgcgagtgcaggcgttccacctccagcagaatggcgcggatcatctgcgcccgctccggcaccacgatgcccatcgcgttctccaccgaggtggtgtaagcggtgctgtgggcgaagccgcagatgccgcacacccggtccgacaggaaggtcacttcgttataacccatgcgggtttccgccagcttttccatcccgcgatggacgtagaacaggcggtagtcggcgtcgataatgttctcgccgtcaacgaacaggcggaagtggccaggttcatcagaggtgacgtgcagcgggccaatcggcaccacgttgtttttcttgctgccgagctcgttaataaactcgtaggtttcggcgtcggtggtcggcgccggacgctggcgataatccatgctgtctttgcgcagcggatagagttcgtccggccagtcgtccggcagcaccagccggcgttcgtccggcaggccgaccggcaccaggccgtacatatcacgcacttcgcgctcgccccataccgccgccgggacgcgcggcgtcaccgacgggtattccggtttgttggcgtccacttccacgcgcacggtgatccagcatttggtgccctgctccatcgacagcacgtaatagaccgcgtagtggccgttgagcttacgttcatcgttgccgaacagcaccgacagccagccgccctgctggtagtagagaaactccaccacttccggcaggtagttgaccttcacggtgatggttaactggtctttggtctgccaggcttcgtccagcaccacgccgggaaaggcctggtgcagcgccgcaaggtagtgttgaccgattttttcttcagacatgctcaaactctcttaatcacgccaccagcaaggagacgaaagctaaaaaggcgaaaccaaacccggcccaggtgacgcgggaggtggcacaaaaacgcagacgcgccatgctgttttcaaacagcgcgataattagcaccccaaccaccagcttaacgatggcgaccaccagcgccagcagcaggccgccgacgctgaagctggtcatctggccccacgggaagaagaccccgacaaacatctgcagcaccaccagctgtttgaggctgatgccccacttcaggatgccaaagccgctgccgctgtattccgacagcggcccttcctgcagctcctgctccgcttccgccagatcgaacggcagtttgcccatctcgataaaggtggcgaaggcgcaggcgcataacgccagaatcagtggaatgctgcgcgccgccggccagtggtaaagggtatcggtgatggcgctgatatgggtcgagccggcgacctgcgccgccacccacaggcccaacagcaggatcggctccaccagcacgccgagcatcgcttcgcgactgctgcccagcgcggtaaacgggctgccggtgtccagaccggaaatggcaaagaagaaacgggcgatggcgaacaggtagatcagggtgatgagatcccccagcaccggcagcggggagtctaccgtcaccaccggcagcgcggtggcgatggtcagcatcacgcccaccatgacgtacggcgtcaggcgaaacacccagcccgaggcgtcaggaccgacgctctggcggcccagcagtttcaggatatcgcgatactcctgcagtacccccggtccacggcggttatgcagccgcgcgcgggcgacgcgaacgatcccggacaacagcggcgcgacggcaaacagcaccagcgcctgtagcaatgcaattaacagactcattctcaggctcctcgcgaaatgacaatcaccaccagcaccgccagctcaaccagcgcgatcccgcgcagcagcgccggcgccgaggccgattgccagcccggcaccagacgcaccgggttcagccagtgacgcagcttcagcaacggcgcaaaggcctctttcaccggcatggcaaagccgtgggccgttaccaccatcgactgctcgtggtcgtaaccgcagacccacgccgcgccgcgcgagcgcgccgccaggcgatcgcctttaaagaagatcatcagcaggaacggcagcagcgggcaggcgataagcagcagcgcgatcatcggctgcgacaccacgctcgatacctgagcctgcaccgggaaggcgccgctcaccagcggcagcagccacggcgcggcgatgccgccaacgaggcagaaaaccgccgccagcaccacgctcagggtcatcagccagggggcgcaggtggcgttttccgcctctttcgtccgcggcgcgccgaggaaggtcacgccatagactttcgccatacacatcaccgccagtgcgccagtgatcgccaggccaacggccagtagcggccccagcagacggccaataaacaggtcgccagtgctcattttgaagaaggattgatagataacccattcgccggcgaagccgttcagcggcggcagggccgccattgccatcagccccaccagcatggcgagggagatcagcggcatttttttaccgatgccgcccagcttctcgatatcgcgatggccggtgcggaaccacaccgctccggcaccgaggaacagcgtggttttgaacaggctgtggttaatcaggtgatacatgccgccgataaagcccagcaccatcagcgtgctgttgcgggtcgccacgccggtgacgaaggcgcccagccccagcaggataatgccgatattctccagggtgtgataggccagcaggcgctgaatgttatgctccatcagcgcatacagtccgccgataaaggcggtgatcatccccagcgccagcagcatcacgccccaccacagcggcggcacgccgccggccagcgaaacggtcagcatgccgtacagaccgactttcatcactaccgtggaaaacagcgcggcggccggcgcgctggccccggcgtgggcctgcggcgcccagccgtgcagcgggatcgccccggccagcagggcgaaccccaccagacccggcagccagagcagcgggttctgcatcatatccgccgcctgaaggttgatctgcgccagctcgagggtgccgtaggttgaccacaccagccagcaggtccaggccatcagcaaagtaccgagacgccccagcgcaaaccacagcttaccggaggcggcgcagccggtgagaaacgccgcgcagagcgccatgatctccgccatcaccaccagtgaaccgatattggtcaccaccaccgcgcaggtcgcggcggccagcagcaggttgaccagcgggccgttggccttcacctgcgggtggcgatgccagctaatattgaacaatgacaccggcagcgccgacaggccgatggccagcagccacagcgcgttgacgccccccacccgtatcgtcaggtggagaaactgcagcatgccgccgtggatccgctccggcatcagcagcgcggcgccgccggtgaccaccagcatggcgctggccaccgcgccgccgatcccggcaatggcgccgctgagcggtttgcgcatggcaaacagaaaggccagtacggcgctggcggcataccacgccaccgcctgattcactaatccaattacactcattccctctccccctgttgcgcctggaacagcgacaagtcgccaaggtcggtattaaaggtcagctggcgtttacgcttgctggcctgggcgatatcacggctatccaccagcatcagcgcgttggtcggacaggtccgcacgcaggccgggccctggtcatcgaagtggcagaggtcgcatttcacggcaatagcgcgcacgcccggtacccagtcgagcagcgagctgacgcgcgccggcgccggcggcgcggggggcgccagccgggtattggcattcgccgggatatccagcgggcggctgccggaaaattcaatggcgccgaacgggcaggcaatgccgcacagtttgcagcttacgcacaggctctcgttgagctggaccgcgccatcgacgcgttggatggcgttaaccgggcagacggtggcgcagggagcatcttcacagtggtggcacatctgcggtgccgattctttttcattacgcatcacctgcagccgcggcatagcctgcaggccgtgctggcgatgcgtctcagagcaggcggcttcgcaggtgcggcagccgatacagacagtggagtcagcaattacaaaacggttcaccgggtcatcctcgggtgaaagtcatttttgacgaaataaggttgcgcaggtgtcattttcgacacgtgtcgacaccttacgatcagtgggtcagcgccagatggcttaaatccaccggttggtcttgttccatggcgtcatacagacggtcatagacggtggcgataatcgccagatagtgctccagcacctggtcgcgggagcggttgctgatgcggccgtccaccgtgccatccattgcgagggtggcctgagcaatcagatacttatcacccccgtttttgttttcgacgtagtactcgatggtgtggctgttgaagccttccgcgagggcgacgaacacctgaaaatggccgaacagcacgaagcacagctctttgtccggcgcgcagctcatcgcgtgatgcaggcgggccttcgacaaggtgatcccctgaaccagcgagttacagtagatgtgccactgctcctgctgctgccggtgacggtcggcgatgtaatccgccttttcacttatttcccaaatagtcatatcggtttctccgtagcatgagatgcaccctctaagcatttttcatgctaggttttatttaattgatttaactatgttttttttatcgacctctgccgatgcgacatgtcgatgacagccccggggcgtcgacatcgacattgactgccacgacgatttcattctggcatcgttattgcatagaaggcgcatcgcgatacggaggcgactatgcacgaaatcaccctcagccagcgggcgctggaaattattgaacaacaggcgcagcaggccggcgcgcggcgggttaccggcgtgtggcttaaggtcggcgcattttcctgcgtggaagccagcgccctgaccttctgctttgagctggtctgccgcggcacgctggcggaggggtgcgaactgcatatcaccgaacaacaggctgaatgctggtgcgatcgctgtcagcagtacgtccatcttgtctcgcagcacgttcgccgctgcccgcactgcaataacgaccagctgcagatcgtggcggatgacggcttacagattcagcgtttagaattggagtaaattatgtgtacaacatgcggctgtggcgaaggcaacctctatattgaaggagacgaacgaaacccgcattccgcgttccgcagcgcccccttcgcgcccgccccacgccagacgatgaccatcaccggtgtcaaaatcgaccacttcgcccccacccgcacgccagagggcgacctgcattacggccacggcgaagcgggtacccacgccccggggcagagccagcggcggatgctggaagtggagatcgacgtgctggataaaaacaaccgcctggcggcacgcaaccgcgcacgcttcgcagcaaaacagcagctggtgctgaatctggtttccagccccggctccggcaaaaccaccctgctcaccgaaaccctcacccggctgaaaggacgcgccgactgcgcggtgattgaaggcgatcagcaaacggtcaatgacgccgcccgcattcgcgccaccggcaccccggcgattcaggtcaataccgggaaaggctgccatctcgacgcccagatgatcgccgacgccgccccgcgcctgccgctggctgaccgcggcattctgtttatcgaaaacgtcggcaacctggtctgcccggccagctttgatctcggcgagcgccataaggtggcggtgctgtcggtcaccgaaggcgaagacaaaccgctgaagtatccgcatatgttcgccgccgccagcctgatgctgctcaacaaagtcgacctgctgccgtatctcaatttcgacgttgagcggtgcctggcctgcgcccgcgaggtcaatccgcatattgacattattcttgtctccgccaccagcggcgaaggcatggagcagtggctcacctggctggagacgcagcgatgtgcataggcattccgggacaaatttgcgccatcgacggcgtgctggcgaaggtggaagtttgcggtattcagcgcgacgtcgacctgacgctggtcggcgccgtagatgagcagggccagccgcggctcggccagtgggtgctggtgcacgtcggcttcgccatgagcgtcattaatgaagccgaagcccgcgacaccctcgaggcgctgcaaaatatgtttgacgtggagccggacgtcggcgcgctgctgtacggcgaggagcgataatgcgttacgtagatgaataccgcgcccccgaacaggtgatgcagctggtggcccatcttcagcagcgtgctcgtctgctgccgcacaccgccgcgcgaccgctgcgcatcatggaggtctgcggcggccatacccatgccatttttaaattcgggctcgaccagctgttgccggagaacatcgaatttattcatgggcccggctgcccggtgtgcgtcctgccgatggggcgcatcgacgcctgcattgagattgccagccgcccgggagtgatcttctgcaccttcggcgacgccatgcgcgtgccgggtaaaaacggctcgcttctgcaggcgaaagcccgcggcgccgatgtccgcatcgtttactcgccgatggacgctctgcggctggcgcagcaaaatccgcagcgcgaggtggtcttttttggtcttggtttcgaaaccaccatgcccgctaccgccctgaccctgcgtcaggcgcgagagcgcaacgtcgataacttctactttttctgccagcacatcaccctgctgccgaccctgcgcagcctgctggaccagccggagaacggaatcgacgcctttctcgccccgggccacgtcagtatggtgatcggcaccgaggcctacggctttatcgccagcgactatcaccgtcctttagtggtcgccggtttcgaaccgcttgatctactgcaaggcgcggtgatgctggttgagcagacaatagcgcagcgcagcgatgtggaaaatcagtaccgtcgcgtggtgccggatgagggcaacccgctggcgcaggcggcgatggccgacgtcttccgcctggatggcgacagcgaatggcgcggcctgggggtcatcagcgactccggcgtgcagcttacgccagcctatcagcgcttcgatgccgaggcgcattttcgcccggcgccgcagcgcgtgtgcgacgacccgcgcgcccgctgcggcgaggtgctgaccggccgctgtaaaccgcaccagtgcccgctcttcgccagcacctgcaatccgcaaagcgcctttggcgcgctaatggtctcctctgaaggggcctgcgccgcctggtatcaatatcgcagtcaggaaaatgaagtatgaaaagcgtccagttagcccacggtagcgggggacaggcaatgcagcagctgatcggcgacctgtttatgcaggccttcgccaacccctggctggcggagcaggaggatcaggcgcgcctcgatctggcggcgctcgccgcccagggggaccgcctcgccttctccaccgacagctacgtgattgacccgctgttctttcccggcggcaatatcggcaagcttgccgtctgcggtaccgccaacgatgtggcggtcagcggcgccatcccgcgctatctttcctgcggctttattctcgaagaggggctggagatggccaccctggaagcggtggtcgccagcatggccgacaccgcccgggcggcagggatcgccatcgtcaccggcgacactaaagtggtgccgcgcggcgcggcggataagctgtttattaacaccgccggcatcggcgccatcccggcggacgttcactgggggacgcagcagattagcgccggtgatgtgctgctggtcagcggcacgctgggggatcatggcgccaccatccttaacctgcgcgagcagatggggctggacggcgcgctgtccagcgactgcgcggtgctgacgccgcttatccagaccctgcgcccgctgagcggagtgaaagccctgcgcgacgccacccgcggcggggttaacgcggtcgcccatgagttcgccgccgccagcggctgcggcatcgaactgcaggaggcaacgctgccggtcaacgacacggtgcgcggcgtctgcgagctgcttggtctggacgccctgaacttcgccaatgaaggcaagctggtgctcgccgtcgcccgcgacgaggcggaaaacgtgctggcgcatttgcggtctcacgcgttaggacgcgatgcggcgataatcggcgaagtggtcgtccgcccgggcgtacgttccgttgggctgtacggcgtgaagcggacgctcgatcttccccacgccgaaccgctgccgagaatttgttaacgacggcgtcgggtcccggatagcggctggcgccttttccgggctacagaactgcgcgcacatgtagcccggctaagcgcagcgcgagccgggaaaaagccagcgtaattattttgcccaaaccagcgggcgcccatggatgggttaaagcggcaataaccgctttattaacatactattatttgtaccatcattttcttatgcgccgcgttgtcggcgcgttttggacgtaagcaatgtcgtatacaccgatgagcgatctcggccagcaggggctgttcgatatcacccggcttttattacagcagcccgatctggccgcgctaagcgaaaccctgacccgtctggtgcaacagtccgcgctggccgatgaggcggccatcatcctgtggaacgcgggtaatcaccgcgcggccaggtacgcctgcgatgaggccggccatccggtaagctacgaggatgaaaccgtcctggcccacggtccggtgcgtcgcttactctcccggccggatgccctgcattgcgatcatgaaacctttgccgacacctggccgcagcttatccgcagcgggctctatcgcccgttcggatactattcgctgctgccgctggcggcggacgggcggatcttcggcggttgcgaattcctccgccgtgacaaccggccgtggagcgagaaagagttccagcggctgcataccttcgcgcagatcgtcgccgtcgtcaccgaacagattcagaaccgggtcagcaataacgtcgattacgatctgctgtgccacgagcgcgacaactttcgcatcctggtggcgatcaccaacgcggtgctctcgcgactggatatcgacgagctggtcagcgaggtggcgaaagagatccatcgctacttccggatcgacgccatcagcgtggtgctgcgcagcgaccgcaaggggaagctcaacatctattccacgcattatcttgacgccagccacccggttcacgaccagagcgaggtggatgaagccggcaccctcaccgagcgcgtgttcaaaagcaaagagatgctgctgcttaatctgcacgaacatgacactctcgcgccgtatgagaaaatgctcttcgagatgtggggcaataagatccagaccctatgcctgctgccgctgatgtccggcaataccctgctcggggtgcttaagctggcgcagtgcgacgaacaggtcttcaccaccaccaatctcaagctgctgcggcagatcgccgagcgggtgtcgatcgctatcgataacgccctcgcctaccgcgaaattcagcgcctgaaagagcggctggtggatgagaacctcgccctcaccgagcagctcaataatgtcgagagcgaattcggggagattatcggccgcagcgaggcgatgaacaatgtgctcaagcaggtagagatggtggcgcagagcgacagcaccgtgctgatcctcggcgaaaccggcaccggcaaagagcttatcgcccgcgctatccacaacctcagcggacgcaacggtcggcggatggtgaagatgaactgcgcggcgatgcccgccgggctgctggagagcgatctgttcggccacgaacgcggcgcgttcaccggggctagcgcccagcgtatcggccgcttcgaactggcggacaaaagctccctgttcctcgatgaagtgggcgatatgccgctggaactgcagcccaaactgctgcgcgtcctccaggagcaggagttcgaacgtctggggagcaacaagctgattcagaccgacgttcgattgatcgccgccaccaaccgcgatctcaagcagatggttatcgacagggaattccgcagcgatctctactaccggctcaacgtgttcccgatccacctgccgccgctgcgcgaacgtcccgacgatatcccgctgctggtgaaggcgtttacctttaaaatcgcccgccgcatggggcgcaatatcgacagcattccggcggaaaccctgcgcactctgacgcgtatggagtggccgggcaacgtgcgcgagctggaaaacgttatcgaacgggcggtattgctcacccgcggcaacgtactgcagctctccctgccggagcgggatatcgtggaagccccgcggacgccggcggtcctgcctgaggaaggtgaggatgaatatcagctgatcgtccgggtgctgaaggagagcaacggcgtggtggccgggccgaaaggcgccgcccagcggctggggctcaagcgcaccacgctcctgtcacgcatgaagcggctgggtattaataaagacgaactggtgtaacctcgcgcgctccccctttccgcgccggtgagagggagcgctggcgcagcgcgctatttatcgctggtaaaaccgttgctggtcgccagttcggcaaaccacagcgcattgcgttttatctgtcgctcgccggtctccagatccagtcgccagaagccgtagcgccgtttgaaggcattgatccacgaccagttgtcgataaacgtccactggtgcacgccaaagcagttcgcgccgtcggctatcgcccgatgcagctgcaccagatgctcctccatcagctggatgcggaaagtatcgtctatcaccccgtccgccccgggctcgccctctgattgtcgatccatcgcgatgccgatttccgcgagataccacttaatattgccgtagttatcgcgaatattggcggcaatgtcatagatcgcctgcggcaggatctcgttgttatcacgataaggattaaagcggccctgcgggttcaccgcgttttcgaaatagtattccggggtgaaataatcgaggtcatattcgctctcacgcgcttttacccgccgcggcacataatagtttaccccaagaaaatcgatatccgcgctgaggatcaacgccgcgtcgtctttgctggtcgtcggcaggcagtcgtgggcggcaaggatctcgcacagcgctttggggaattcatgttttaccagcgggtcaaggaagctgcggttaaaaaacaggtcggcatacccggcggcttttttatccgcgtcgctgtcggtgagggtatagctcggggtcaggttgagcaccacgccgatctcgcccgccagcgccagttcacgataagccgttaccgctttggcgtgcgccagcataatgttaaacgccacctgcgccgccagccggccatctttcttacatggatagtgaaagtcgtacaggtagcctccctcaaccggcacaatcggctcgttgaaggttatccagtatttaaccttatggccaaacaggctaaaggcggtgcgggcaaagcgggcaaacagctcggctacgtgcgccgattcaaagccgccgtactgtttctgcagcgcttccggcatatcaaagtggtagagattgatcatcggctcaatgccgttggcgatcatctcatccagataggcgtgataaaaacgcaccgcgtccgggtccggcgcgccggtttccaaatcagcgatcagtcgtgaccactgtatcgaggtacgaaatgagttgaagccggtctgtttcatcagcgccacgtcctgcggatactgatgataagtatcacacacggtctgcggccctacctgctgataaaatcgctccggctgttcggcaaaccagctgtcccagatggaacgatggcgcttattggtgaccccttccgtttgcgggccggacgccgccgccccccacaggaacccttgcggaaactgatactgctgcataacctctccttcgaaaaaaggctgcgcccgtctggcgcagcctgaacgtactactcagcgaccacttcgatcgatttaatgaacatatagccccagtcgccggcgaagcggccgaagtcaatctgattgctcccggctttaagcgtcaccggtatccgcagctgctggccctgctcatccgtctgcgggaaggccaccgcctgccgagcgcccccgttgacgacaaacgagttctgcttaccgccccatttgccgttgaaggttacattgagcaggaactgaccgctccacggcgcctgcacctgccagctgaccttatccccctcgttggcaaatgggccgaggaagccgtcctcaccaactgtcagcgcgtctttatcactcttcatcaccgtcagccgcccctcagccacgccataaacttcgccgtgataacgacaaaaatccgctggcgctttccccgtcgcctcgcccaccgtcacggtcacggttttgctgcttttcaacagcccatcgtccgccgtgaacgtcagcgcataggtgcctggcgccgtaaaccaggcccggttttgagcccgatcggcatggcagaaatgcacctggccatcgccggcgtgctgccagcccaccttaacctctcgcgacggcaggccatcgtcctgccagctggccgtaagctcgacgccctggtcctgcgtggtggttagggccggttccagcgtgacaaccggtggctgattctcctcgctatgctgcacgctaatcacattggaaggggccgaacgaccactctcgtttttcgccgtcacccggtagtaatacgtgtgcccgagctgaagctgacgataatcgtcgcggaacagaaccatggtttccggattccattcgttaacgccatcggagatatcccggcccaccaccgtccacggcccggtcggtgaggcggcgcgttcgacatcgtagctgcgtcctaccgcagcgcccatccagttgatcgcgaagggcgaggtggtttcgcgcagcaaaggcgcgtccggcttcggcagcggtgccatcgtctgctgcccggccatctgcgccgcggcggtgcgcaccagatcgaccaccgcctgctcctggttcgcttcgccttctttggcaaaccccggcaggtggtagctatagtgcccggtcgactccttatgccagtagaagccgccgtcgtgacgatggccgcggaagccccagataagcccgccggcagcttgcgccccgttgacgtcgctgtgaacaatcgactgcataatggcgttcagttgatccgccggcagcaggccaaactcgccgacgagatagactttttgtccgccgacggcgcgcagatcctgcgtcacctgcccgggatggttattatcggcattggtgtaatagtgattgctgacgatatccacattggggtcggtcaacgcaaacggattaattttcttataggtgccatccaccaccagctgatgaggggcccattttttaatccacgccgcggtctgatgcaggaaatcggcgttggtatcctccagctcgttaccggtttcccaggccatgatcgccttttcatcataataggcgcggccggtgacggtatttgtccgggtgataacctggcggatcacatccagataggctttgaaggtcttgctatcggtccgataaaagtcttccgctttttcatgatagaacgccgccagctgctcgcgcccgccccaccaccaccagtggtcgataaacggcaggatcagacgcaatccctgtttatccgcttcggcaatcatgttgtcatacacccgcatggctttctcattcagccgcggcatgccgtccgccgtttccggcgccagaatatgggtctcacgcccgcaggccttatcaaattcctgctgcaccgacagcacgtagacgcgctgggctttcgccccggtttgcaccatcgcctggatccagttttgctgctcctgggccgttggccatttaaagtattgcccccagccgcgcggatctgccctgcaggggccgcgggcgtcgtcttcaatgcggtgtagctccggcgcgtggatcccggcgaaacgaaacaccttgtcgccgtccttgagggtggcgccgtcgcgagtgataaagtgcgtaaagtgcgagcgctcggcggccagcgccccgccggcccccagcgcggacagcagccccatcagcagcaggtttttcatcggcttcatcgttgtctctccttagaaccagacctcggcctgtacgccgaagttaacggtgtcggtagagccactgcgggaatacccgccggcggtgatggtattggtatcccagttgtagttaccgtctaatgcatcggagacacctttatcccacttcgcgtaggtgacgaagaagcgcagctgcggacgcgcccagaaaccggagtcaaaggtcagcgttggcgcaacggtgactttggtcaggccgcctttgcctttgccgtttactcctttgtagtttttgtcatccaggtattcgtagcccagctcgtactgcatggcaaagttgcgggtgatctgatgataagggcggataccagcgacccacatcgagcgtccccagccattttcatcttccgtccaccagcggtagtttttatctttttgccagaaagcgaaggtcgagatctccaggtcgcccatcgaggccacgctatccagcaccactcgccaggactgggtgttttccaggttggcccagccccagccgtttttacccagcgagtcacccgccgccagccctttcccgtactgcaatgcgaggcgggagtagcctccggtcagaccatagaagccgtcaaagttataaataccggtcacgccatagcccttctcggcggaagtcggatggttttcgttacggttcatgtggtggccgatcagctccagatcgaagcctgtccccgcgatctttttcagccacaggttgagggaatagtcatccgggtagccctgatctcccttatccaccgggtaggctttggtttcatcggtgggtgaaaaggcgtacaccccggcgtcgaagcgggcgaagccgagatccatgttatcgaagccgccgccggtgccgttgtactgaatgtactcccagtcgaactgatggctggaggtgttggagctgctgtagcgcttaccggcccagaaggtcatctccggcgcaaaatccagattgctcagctcggcgaacccttcacgaaactgtacgtcatggccatcgtcatcctgacagttccagtcggaggtgcatttcgactggtgagtgaggttggcctgcactttcgccaccacgccgctgtccgccgtcagcgtcacggtggggatcagttcgatcttggtgtcttcttcgttgcccagtcgccacttaccgtccggcatcaggccgacggagtccgcgcggttgccatcggagttcgccaggatcccggagcggatatagccatgcagcgcaaaatcatacttcggatcggcgcaggccgggctgctggcccctgccagcgagaggagagccagaggtattgagtgtttcagctttatcattatttttttcccacgttatgtttgttaacacgaaccgataacggaggggaaatttacggatcaaaaacggaaatgtacatccacttacggaaagcgctttccataattgcctatctggttcacaaaattagctctgcggcgaatatattcgtgagactgatcacataaaattacaagaatgccgccgggagccggcagtggagcggaaggaggaggagatgagcaggtgccgccgggggataagccgccgacggcgagggggtcagcgttcggtttccgcgagctggcgttcgtacactttgaagaaggggcgatagagcatccaggcgttaaacatcgcgaacaggctcatgcacaaatttttccagctgccgttcgccgaccatgccgcccccagcggggaaggcatcgaccatggcagcatcgccaccgcgcggtcgaggatacccagctgagttaaataccatgcgatacaggcatttatcagcggaacaaagagaaacggcagtaaaaaaaccgggttcatgatcaccggaaaaccaaacagtattggctcgttgatattaaacagcgacggcagcaggccaatcttggccacgcttttcagctgccgcgagcggctgcgcatcgccatcagcaccagcggcaaagtggagccaataccgccgatcagcaggtaaaaatcccagaacccctgcagataaatatgcggcagcgttggcgaacccgccgccagcgcctgctgattttcaaacagataggtcatccagaaggggttcatgatcccggtgatgatcagcgcgccgtggataccgataaaccagagtaagttacagataaataaagagataagtaccgccatcagcgtgtcggacgccagcaccagcggccgcaccgcttcgctgatcaactccggtacgatgcgtccggtggtctgcagcagtatggcattcatcacgcttatcgacagcatcaccaccagcagcgggatcagcagttgaaagccattgcgggtcatcagcggcacttcatcaggcaagcgaatgcaccagccttttttgtagaaaaagcgaattatctcaatggaataggtgctggatatcagggcggtaaatatccccataccgccgagataaacattgctcaccgcagtctcgcgaaagccgataaacagcagaaaagccagacacccggttaaaccgcagagccgttccggcagacggtactgcttggcgagactggcgctggcgccgaaggcgacaatcagcgccaccaggccaatagttagctgaaaggtcggcagcaggataggccgcagcagcaaatagacctggccgaaacgcgaggcgccgtcgatggaaacgggcggaaacaaaatgggaactaacaggctgccaacaatcacaaagggcatagccagcgcaaagctatcgcgcatcgccgtaatgtggttgttgcgcgtcagaacgttcgccagcggcgccagccgctgctcgatgatgtccacggccacattcattaactgaatgttcatactcctacctttgcgaatggttgtctcgccgggatgatcgcccacaacaccggaaagtgaaagcctgccataggtgatcatggtcacaattaataaatccacaaacggaaagcgctttccgtaatgcatccattttgactatagtccgctcatccaacctcatcaggagcggtaattatgaaaaaaattatgttgtgttgttcggcaggcatgtccaccagcctgctgatgaaaaaaatgattgcggaagccgaacagcggggcctgccggtagagatcaacgcctatggcgtagcggagtttgccgaacaggtcggccattatcaggtggtgctgctggggccgcaggtgaaatacatgcagcaggacctgcaaaaacaggcggataaatacggtatccgcgtcgaacccatcaatatgatggactacggcatgcaaaaaggcgccgcggtccttgatttcgccctttcccttatcgaaaacaagaactaaggaaagatcatgagctctctgtacgctaaactgatcgacgtgatcgaacggcagatcacgcctatggccggcgcgatcggccagcaaaaatatgtcacctcgatccgcgatggctttatcactgccctgccctttatgatcgtcggctcgttcctgttggtgtttatcttcccgccgttttctccggatacgacgtgggggtttgcccgcgcctggctgcaattttcgctcgatcatcgcgatgcgctgatgctgccgttcaacttcagcatgggggtgatgaccctgtttatcgccgtcgggatcgccgccagcctcgccaaacaccatcatctggactcgctgaccgccgggatgctgtcgctgatgtcgtttctgctggtagccgcgccgctgaaagatggccagatctctactgcctacttctccggtcaggggatctttaccgccattctggtggccatctattccaccgagctgtacgccttcctcaaacggcataacatcaccattcgcctgccgccggaagtgcctgccggggtggcgcgctcgtttgaaatcctgatcccggtgctggcgatcattctgacgctgcatccgctgaacctgtttatcgaagcccagctggggatgatcattccggaagcgatcatgtcgctggtgaagccgctggtcgcggcttccgatacgctgccggcgatcctgctgtcggtgctggtctgtcaggtgctgtggttcgccgggatccacggcgcgctgatcgtcaccgggatcatgaacccgttctggatggccaacctgtcggtcaatcaggcggccatggccgctggcaccgctatcccgcacatctatgtccagggcttctgggatcactatctgctgatcggcggcgtcggctccaccctgccgctggcgctgatgctgctgcgcagcaaggccgtgcatctgcggacgatcggccggatgggggtcgtgccgggcgtatttaacatcaacgaaccgattctgttcggcgcgccgatcatcatgaacccgctgtttttcctgccgttcgtgctggtgccgatggtgaacgcgaccctggcgtacttcgcgctgaagctggacctggtcagccgcgtagtgtcgatgacgccgtggacaacgccggcgcctatcggcgcctcgtgggcggcgaactggagctttagcccggtgatcctgtgcctcatttgtatggctaccgccatggtgatgtacctgccatttctcaaagcttacgaaaaacagctgctggcccaggagcgtgaaaacgccgtcggccaggctgacaacgcggcgcaaaccgcttaacgctaacgattcagaggataatcatggaattagaagaacaggtgatggggatcatcatcaacgccggccagtcacgtagcctgtgctacgaagcgctgcacgccgctaaagcgggtgatttcgccaccgccgacgccaaaatgcaggaagcggcgcactattcccgcgaagctcaccttgtacagacccagcttatcgaagctgacgaaggcgagggaaaaaccaaaatgacgctggtaatggtccatgctcaggatcacctgatgacatccattctggcgaaagagctgattgccgaactgattgcgatttaccgcgcgcagccgcttcacgcctagcgccttgcccggccagacgcgctggccgggcctgattccccgaggtcactatgttacatcttggaatagatattggcggcaccaaaatggaagccgtactgctggacccggcgggcgaatgcgtccagcgcctgcgccggccgacccacaaagagagctatgacgcctttatgcgtcagctgctgaccctgattgccgatattcgcgcggtcagcccgcagccgttcaccctggggatcggcctgcccggggctatcgatccgcaaagcggacgcattaaaaactgcaactgcctggtgctcaacggtcacgatctgcgccgggatatcatgcagcagcttggccagccggtgtggatggcaaacgatgccgactgcttcactctttcggaggcggtggatggcgccggcgccggagctaccaccgtcttcggggtgattatcggtaccggctgcggcggcgggatcgccgttcatcaacagctgctcagcggccccaacgctatcgccggggagtgggggcataatccgctgccgggctatactcctgagcgcgatggcccgccgcagccctgctactgcggcaaaacgaactgcatcgaaagctttctctccagtaccggcttcgcccgccgctatggggaacaagcccgtgcggaagccattgtcgccgcggcgcaaaacggcgatccgcgcgcgctggcccactggcgacactttatcgatgcctttgcccgcagcctggcgtcggtgatcaatattctcgacccgcaggtgattgtgctgggcggcggtctgtccaacgtcagccagatctatcgcgatctgcctgccgccatcgtgccgtggatcttctccgacacctgccgcacgcagatcaaaccggcccgtttcggcgacgccagcggcgtgcgcggcgcggcctggctgccccggcttcccggcgccgcgcaagggcagcggtagacacttttttcagcaggtatgttaagctaggcgaaaatgttcagacagaaaaagccatgccaacgattgatgatgtttcaagattagcgaatgtctcaagagcgacggtatcccgcgtgctgaccggcacccggggcgtgcgcgaagagagccgggaagctgtgctgcgggccgttgaagaactcaactatcgcccgagctttgccgcgcaaaacctcgccagtcagacatccagccacgttggtctggtgatttccgcgcaggacgaaagccacggcgcacgtctgctgccgctgctctctcaggcgctgaaagggctgaataaaagcctgctggtccagtacgtcagcgacccggtagagcaggcggcggtaatcgacgatctgcagcgccagtgcgtggcggtggtggtgctgggcgccgttgccgccgacgcgccgcgcaacgttatcgcctttgaccgcttcggcgtcgccgggagcaacagccagggctatgacttcgcctttgccaccgaaagcgcctgccgctatgtgattggcaagggacaccgcaacatcgccctgctggtggacagcgatagcgacgatgccagccgtcagatgctggaaggctaccgcaacgtcctgcagaactactccattccttttaaccgtcagctggtgctgacggccaacgatgacgtcgagcaggcgctgctgaccttaattaacagcttcagtaaatactcagtcattatcgttaaacgcgaccgctacgcggctgaggcgatgcgtctgctgcgcgaattcaccatcgccgtcccgcaggaggtctccctgctgagccttgaggattccccgctcgcctcgctgctctacccgccgctgacctgcatctcctggccactggaggcgctgctggataactgtattcagcgtattcgcagcctgattgacgaccggccaaccttcgccaccgagggccgctcgctggctggccgcctgatcccgcgccagtcggtcgccgatatctcttgatcttcgcccggttggcgccgggccagacttacctccccttttcgcgctttcgtttcccggctcattattacccacgcatgcaaataagaattattttcatttataaatagcttgtgctatataacatagcaatggctataaacgctgggaaattaaccacaccattgcgagggatcctatgctacacctgacaccgctgaaatcattgctgctggccagcgcgctggctctgctggccgcgacgccggcctcggcgcaggagaaattcagggttatcaccaccttcacggttatcgccgatatggcgcagaacgtggccggcgacgccgccgacgtgagctccattactaaaccgggcgcggagatccatgattaccagcccacgcccggcgatatcaaacgcgcgcagggggcgcagctgatcctcagcaatgggcttaatctcgaacggtggtttgcccgtttttatcagcacttacagggcgttccggaggtggtggtcagcgaggggatccagccgatgggcatcagcgcgggcccctatagcgggaagcccaatccccatgcctggatgtcggcagataacgccctgatctatgtcgataacattcgcgatgcgctggtgaagtacgatccgcctcacgccgacacctatcgccgtaacgccgaggcctacaaagagaagatccgtcagacgatggcgccgctgcaggccagactggcgcagctgccggcggataagcgctggctggtcaccagcgagggagccttctcctatctggcccgcgactatggcctgcgcgaactgtatctgtggccgatcaatgccgaccagcagggcaccccgcaacaggtgcgcaaggttatcgacaccatgaagaaagaacgcatcccgaccatcttcagcgaaagcaccatctccgataaaccggcgcgtcaggtggcgcgggaagccggggcccactacggcggcgtgctgtatgtcgattcgctgagcgccgccgacggcccggtgccgacctggctcgacctgctgcgcgtcaccaccgaaaccatcgtcaacggtatccaggacgggatgaggaagcagccatgaatgcagcgcaagcgggactgtatgtcaaccagctcaccgtcacctggcgcaacggccacactgccctgcgcgacgcctcgttcagcgtgccgcgcggctccattgccgcgttggtgggggttaacggctcgggtaaatccacgctgtttaaagcgctgatgggctttgtccgcgttggtcacggcgagatcgccatactcggccagccggtcaaccgcgcgctgcgccagaacctggtcgcctatgtcccgcagtcggaagaggtggactggtccttcccggtgctggtggaggatgtggtgatgatgggccgctacggccatatgggctggctgcggcgggcaaagccgcgcgatcgcgagattgtcgatgccgcgctggcccgcgtgggcatgagcgagttccgccatcggcagattggcgagctctccggcgggcagaaaaagcgcgtctttcttgcccgcgccatcgctcagcagggtcaggtgatcctgctggatgaacctttcaccggcgtcgatgtgcagaccgaagcgcggatcatcagcctgctgcgcgagctccgcgatgagggctgtaccatgctggtctccacccacaacctcgggtcagtgagtgaattttgtgattatacggtgatggtgaaaggcaccgtgctggccagcggcccgacagaaaccaccttcactgccgagaatctggagcgggctttcagcggcgtgctgcgccacgtcgcgctcacaggcggggaagcgcaggttatcaccgatgacgagcggccgtttatcagccggcgcgcggcgggaggcccacgatgagctggctgctggagccgtttggctattactatatgctcaatgcgatgtgggtgtcggcgctggtgggcggcgtctgtgcgtttctctcctgctacctgatgctcaaaggctggtcgctgattggcgacgccctctcccactcgattgtgcccggcgtcgccggggcctatatgctcggcctgcctttcgcgctcggcgcgtttctctccggcggcctggcggcgggcagcatgctgtttttgcaacagcgctcgcggctaaaagaggatgccattatcgggctgatcttctcctccttcttcgggatcgggctgtttatggtgtcgctgaatccgacgtcggtgaatatccagaccatcatcctcggcaatattctggccatcgccccggaggatattatccagctggcagcgatcggctttatctcaatggcgattctgctgctgaagtggaaagacctgatggtgaccttctttgatgaacaccacgcccgctcgattggcctgaacacccgcggcctgaagctgctgttctttaccctgctggccgcctgcaccgtggcggcgctgcagaccgtcggcgcctttctggtcatctgcctggtggtcactcccggggccaccgcgtggctgttaaccgatcgcttcccgcgcctgctggccatcgccgtggctatcggcagcctgaccagtttcttcggcgcctggctcagctactatctcgacggcgccaccggcggcattatcgtggtcgcgcaaacgctgctgttcctcatcacctttatcttcgcgccgaagcacggcctgctggccagccgccgccgcgccagggaggccgcatgctgaacctgttccaggccccgttccagtttccttttatggtcaatgcgatagcgatatcgatcgtcgtcgccattccctgcgcgctgctgtcggtgtttctggtgctcaaaggctgggcgctgatgggcgacgccatgagccacgcggtctttccgggcgtggtgctggcctacattatcggcatccccttcgccatcggcgcgtttatcgctggtctgctgtgcgccgtgacgaccggttttctcgacgataacagccgactcaagcgcgataccatcatggggattgtcttctccggcatgtttggcgccggactggtgctgtacgtagcgatccagtccgatgttcatctcgaccatatcctgttcggcgatatgctggggatctccctcagcgatattgggcaaacgacggcgatcgcactggtgattgcgtttattatcggtctcaaatggcgggattttttgctgcacgccttcgatccaacgcaggctaaagccagcggcctgcgcggcggactgctgcactacggcctgctgtgcatgatcgccctgaccatcgtcgcgacgctgcagtcggtggggattattctgtcgatttcgctgctgattgccccggggcgatcgcgcttctgctggtgagacgctttatccacgccctgctgctggcggtagcggtggccatcggctgctcggcgggaggggtgtggctggcgttctatctcgacagcgcgccagcgccgactatcgtagtgctgtttaccgcgctgtttgtggtcgcctttgtcgcaagcacgatccgcgatagtcagaaacagaaaacttcagcaattatccccggtggcggctaacgccttgccggggctacaagagcacgacttgtcgcccggctgcgcagcgctgaccagggaaagccgctactttttcggtcgatatttttccggcagcggcggcaccgggcgcctgtcgtccagcagatggcgaacagtgaggatcgggtggcgccagagcatccgcggcccggcccagcgcataatctgcttcatctcctcgcgcttcgccggctggtagcaatgcaccggacactgcttgcaggccggtttgttctcgccaaacacgcacttatcaaggcgcttgtcagcgtaggcgttcagcgcctgatagtgcgcattatcggcctgcgcgtcgggactgcgccgctggtagagggcaatcatccgctgaatcgtcattttttcccgttcgatacgcttccccatctccccgcctttcgtctgctcttaaggtgtatttatcatacaccttaatatccatacccgaccagactcactgcttcagatgctgaatcaactgcagggctgccccggacagaaccccgaaatggctgtaggcatagaaatcccggataaaaacgctgccctcgagctcaaacgggcgcagcaggccaagcgcttcttcgtgtcggtaaaccggggccggcatcgacgttaacagatcgctctcgcacagaaaggccttaatggccgaggatgaggcgcactcaataaccggctgcggacagggtagctgccgggcgcgaaagatatccgccaggatgttcattggcgtactagacggcggcggcataatccacggatagtccagcatcgcctccagggtgacgtccgccgcctgatgcagcgggtggtgctgcctggcgacgatgcagatccggtcctgccagttaattttgccccgcaccacgattttctcatcatgcggtaagggaccgcagagggcgatatcgatgtcgtgcatcagcaacagcttatacagctcggagtcaatgcggtcgacgatccgcagatggatctggggatggtgctgatggaaagccgccagcttatcgatgaaatggctggtcagcagactggaaacgcagccaatccgcagaatgcctttcccggcgccacggatgagctcaatttcctcgcgcgccttttgttcggtattcagcatcgtcagcgcgtagggtaaaaaggcgctgccatattcgctcaacgccatgccgtgcttatgtcgttcgaataaggatgcgctcaggtccgcttccaggctcaatagcagtcggctcagtcccgactgggtgatccccattttctctgcggccagggtcatattgccttcgcgggcgacggtaataaatgcctgaatctgcttaaatttcattggcatgatatttactcattgaataaacggtttttgcatttcccctgcgcccttttttagcgaataaatatcgctatcaatacgctcaaaaatcaccggaacgcatacttcaaaaggatttatttatctcaccacccacggcaaaacacatttttgaaccgaagataatttataatgagaatatatcaccatgacacagaacaatattctattaatttcaggcgctatattaccggtcatcattaccgtcatcatcggctatattagcggtaaacgaaaagactttaactggcagcaggcaggagacatcaataaaattgtgatgctctacgcattgccgctaagtattttcagcaatatggtgatgacgccgcgacacatcgtcatgaccatgggcccggtcgccgtggctatcatcctggcgctgattctcagcttcgtcattcccttactggtcgcccgctatctgtttcgacgcgacctcgccctcagtacgctgcaggcgctggccatcggctcgccggcagtcccgtttatcggcacctcagtgctggcctttttatttggcaccgtcagcgcgtcgctgatcaccgtgtccagcatcacgcaaaacgtcttccagctgccgctggtgatgatactgatgtcggtcgccaccggcgataagagccagcatatttcctttggcgcacgggtggtgaacgccattaaacaacccgtggtctggtcgccggtaatcgccctgatcatcgtgctggcggatatccatattccgcagactatctcgatgtcgctgggtctgctgggcaaagcctctggcgggctggcgctgtttgccgccgggatcgtgctctatacgcgcagcattgttatcaccaccgctaccattatcaccgttatcgcccgcaatattctggtccccggcgcctgctatctcattttattaaaaatgggcttcagcatggagcaaataaaggaagtcgtattgacgatggctatcccggtaggctccatcgcgataattattgctatgcagtataaaaccggcgagcaggaaatggcctcgacgatggcgctgagtattattgcctccatcattacgatgggcggatttattttcttaaccttttaattaccgcgattacaccgcgtgaatacggagagaatatggcctctatcacattatcggctgctgaacttttactgcatcggctacaggcgctggacgtggcgtatatttttatcaactcgggcaccgattatcctccagtcattgaagcctgggcaaaggcccgggcgaccgggcaaaaggtaccggagttagtgatctgcccgcatgaaaacgccgccatcggcatggcccatggctattacctcggcaccggcaaggtgcaggcggtgatggttcacaccaacgtcgggctagccaacgccgcctgcggcgtcatcaatctggcgaacagcaatattccggtgctgatttttggcggccgcacgccgataagcgaacattcccacttcggctgccgtaatacgccgattggctacggccaggagatgcgcgaccaggcggcgctgatccgcgaatccgtgaagtgggattttgaactgcggctggccgatcagatcggcgagcatgttgaccgggcctgggcgatcgccagctccctgccgaaagggccggtctacctgagcttaccgcgtgagccactgtgcgaaacctttgccgtcgatgaggccgcgctgcaggctggcccttcgcagcagccggtccgctatgcgccagtcagggaagatatcgcccgcgcagccgaggcaatcgcctgcgccagacacccggtcatcttcgcccagcgcggcgcccgaacggcggaaggctttgcgcgcctcgatagtctggtgcgcgaatgggcgatccctctggtggaatactggggcaccgaggttaccctgagcgccgataatcccctgctcgccggggctgatcccagcgtctggctcgctgacgccgatgtgattctggtggtcgactcgcaggcaccatggatgatcgccgagggcgactgtcgccaggactgcaccgtgatccagatggggcccgatccgctcttctcccgctacccggtgcgcggctatcgcgcggacatcaacctggcgggcgagaccgatgaagtcttcagcctgctggaagaggcgctgcgcccgctgcaggccgcccgccagcagcatgtggcggagcgggcggcatatacgcagagccgcatccagcaacagaaaaaccagcgcgacgcgcttctccatgccagccagaccggggccattaccaaaccctggctcagctactgcctcggccatctggctaatcaacaccgcggccggatcgtttctgaactgaccacgctgccgcagtttgccggactgacccatgccgagagctattaccaggaagcgctggccggcggcctgggcgaagccctgcccatcgcgctggggctgcagcttgcgcgccgggaagagctgattattgccgccgtcggcgacgggtcgtacctgttcgccaaccctgcggtctgccaccatattgcggaggtaatgaagcttcctgtcctcgtcgtggtcggaaataacggcggatggggcgccgtcgcgggcggcaccaaagcgctctacccggacggctacgcggcccgcgcggaaaccattccggccaccgcctttaccacctcgccggatttcgccgcgatcgccgcctccagccgcgcggcggccctgtcggtttcccgggccgaagatctccccggcgtgctggaagaagcggtatccctcatacacactcgccgacaaagcgtgctggttgacgtgcagttagcccactaacggcttctcctccgggcgcttgtcgtccggagggggttgtcaccccttctggtcacctttatccacatggcccagcggcttctccgggaagcagacatcgcgcacccggcgtttcagctcggccgcatccggaaaaccgccatcctgcttgcgctcccagatctgctgaccgtcgacatcgatcgtgaagatcccgccggtccccggcaccagcgtcaccgaggcgatgtcggtgctgaaggtatataacagctcctgcgccatccagctggcgcgcagcatccagttgcactgggaacagtaggtgatggtgatggccgcttttgagttcatcgtcgtctcgctaagtctgaaagggcaaattgtaaacaaagtgcagtttaaatgaagaacacatgattattttgttgcaaacgataatacctatcattaccattcgcaatcaacaaatggagtaagaccccatccgcaacggaaaagacggagcaacctgcatctctggaagtaacgcgtgagccgatactaataacgatcaaggcgtggcgactatgtacaaatcgactccgtcagcagcatggtgtaaaaaacgcctgctggtgacctctttgtttgcagcaatttatcagacttctgccatcgcagcagatacttccgccgttagcggcgaggcggtggatgacacctcggaacaaatgaccgtcaccgcccccgcgccggtgcagaaagccggtagcgaacacagcatcagcgcccgggagctggagaataaaggcgctaacgatttcggctcaatcatgcgctatgagccgctcatcagcgccaccggggccagcggcggctccggcaacggcaaaagcggcttcgaccgcggaggttacaccggctacaacattcgcggtatggagagcaaccgcgtaggcatcgacgtggacggtatcgcgcaacccaacgccaccggccgcggctacgtcggccgcgccgggctcaacaccttcggcatcggccgcgattatatcgacccgtatatgtacggcagcgtggatatccagtccggcgccacctcgacggaaacggccaacagcgctatcggggggaatgtctccttccgcccgaaatcagcggatgattacctgcgcccgggcaagaccagcgccttcggctaccgcagcggttacgactctgcggatcgcagctggcacaacggggtgaccgtcgccggcggcgatgagttcctgcgcgggattttggtctatagccgccgtgacggccaggaaaccgaaaacaacagcggcaccgtcgacgcctacccggcgaactggcactccgatgcttttctggcctccgggatctggcagcctaacgatgagcacaagctgaccagcaccttcgactattaccataaaaccaaccacacccactacgatacctgggactccagcggcaacagcaccatcggcaccgccaaccagaccagccagacccggcgctggggcctgagcctgaaggatgactggacgccgatgaacgactacctcgacagcgtctccacaaaaatctactaccagcataccgaagcccatgactggacttatatgccggacagcgtcacccgcaaaatgcagacggtgaactctaactacgataccgacacctggggcctgcagaccgcgctggcgaaaaccctgggccgccacgatctgagcgccggtttcaacgccagcaccagcaaaacccagcggccgttcagccagtcgccgatccccagcgtttacagcgagatcatgcagccggaggcagacagccgcagctacaccctcggcggctttgtccaggataagatcaacttcgatctcgacagccacaacttcgccgttattcccggcgtgcgcgtggtgcatcaatcgactaagccggaaaatctgtccgatctcgccgccaacagcagcgtgctgagcgaatcgtcggtggcgaatctgtacggcaaaaacagcgatacccaggttctgccgtcgttgaccttccagtacgacctcaccccgcgcctgatgacctacctgcagtaccagcgcggggcgcagttccccaacgccagccagctgtatggctcctggaacctcggctccagctacgccggcagccagcagtatgccctgatcggcaataccgatctgaagacggaaaccagcgataatctcgagtgggggctgaaaggggaagttaccgaaggcatcaccctgcgcacggcgctgttctacaacagctataagaactttatcgcctatacccgctatacccgcgccaacaatccgggccagttcacgaatgtgccgtcgaacatctacaccatttatcaggcggaaaaccgcgataaagcctatatctacggcggtgagattagcaccaaatttaactttggcacctggtttgagcaggtggacggcctgagcgccaccctcgccctcggctatagcgaagggaaatcgaaatccagctacagcggcgataaatacgtcgacctcgacagcgtggcgccaatgaaagccatcgtcggcgtggcgtgggacgatccggcgaaacgctacggcaccgccctgacggcgacctttgtcaaagggaaacaggcgaccgccaccaaccgcgaaagctacagcaacagcggatccgccatcaccgatgccagcagcgactatatgcgcgtgccgggctacggcatgctggactggaccacgtactggcaggtggcgaaaaacgtgcgcctcaatggcggggtctacaacctcaccgatcgtaaatactgggattacctgagcagccgcaatatcgagaccggcaccaaccaggacgccaacgataaagcgctggcggtgatgccgggccgcacttggcagctgggcgtcaacgtcgacttctgattgcccgaataataacgcacctgcccccggcccgccggccggggatattcatcgtcgagaaggatatgattatgccaaatgcacaccctgacctgtggcagcgctaccaggccaccaaagcggccagtaccgcgaaatatgcccgcgatatcgccgcggaaatggggatcagcgaagccgagctgaccgccgcccgcctcggtcatgatgccgtgcgcctgagcgatgacgcccgggcgctgattgccgccctggagcgcgtcggcgaaaccaaatgcatctgccgcaacgagtatgccgtgcatgagcaggtgggccagttcacgcaccagcacctcagcggccacgccgggctggtgctgaacccgcgcgcgctcgacctgcgtctgttcctcagccagtgggccagcgccttccatctgaacgataatggccgtcagagcatccagtttttcgaccaccacggcgacgccctgctgaaagtctatgcgaccacgcagaccgacatggcggcctgggagaccctgatcgcggaatatcgggtggcggcgccggcaccgctgaccctgcgcccgctggagccggtgaaatatgccgataccgccgacggcgccgccctggagaacgactggcgcgcgatgaccgacgttcaccagttcttcggtctgctgcgtaaatatcagctttcccgccagcaggccttccgtctggtgagcgacgacctcgcctgccgcgtggatcgccatgcgctgccgtcgctgctggagacggtgcgccaggagggcaatgaaatcatgattttcgtcggcaatcgcggctgcgtgcagatctttaccggcgccctggaaaagctggcccccatgcgcggctggctgaatatcttcaatactacttttaccctgcatctgcgcgaagagagcctcgatgaagtgtgggtgacccgcaagccgacttcggacggacacgtcaccagcgtcgaactgttcgctaaagacggcacccagattgcccagctctacggccagcgcagcgaggggcaccccgagcagacgcaatggcgccagcaggtagaccgcctgacccgtgaagggcagcccgcatgatgcgctggttactgctcttgatcgctttcccgctgctgagtcacgccgccgttgagcggctcgtcacactcggcggagatgtcactgagatcgtttatgcccttcacgcggaggagagcctggtggcgcgggacagcaccagcagctggccccggcggcgcaaaagttgccggacgtcggctacctgcgacagctgaacgccgaggggatcctcgcgttacgcccgcagctggtgttagcgagcgcccaggcgcagccctcgctggtcttacacaaagtgcaggcgagcggggtgaaggtggtgaacgtgccgggcggcgaaagtctgtccgcgatcgataacaaagtggccgtcattgccgaagcgttaggcaaaacggcggcaggcgacgcgctgcgccagcagcttcagcagcagatcgccgccattccaacgcagccggttgctaagcgggtgctgtttattctcagccacggcggaatgaataccctggtggccggacagcataccgcggccgatggcgccattcgcgccgccggattgcagaacgcgatgcagggcttcgaccactatcgcgccatgtcgcaggaaggggtcgccgccagccaggcggatctggtggtgatctccgccgatggtctcaaagggatgggcggcgaagccgggctgtggaaactgcccggcctggcgcagaccccggcggggcgtcataaacagctgctgacgatcgacgatatggccctgctgggcttcgggccgcgcacaccgcaggcgataatcgcgctgcgaaacaaagcggagcagttgccctgatgcgccctgccctcgctcgccgtttgctgctgatgacgctgctgctggtctccctgacgttgtttgccaccaccctcggcgccatgcgcttgccgctggtcaacctgctgccttccggggatgacatgctgcgccatatctggctgaccatccgtctgccgcgggtgctgctggccctgctggtgggcgcggcgctggccctctccggctgcgtgatgcaggggctgtttcgcaacccgcttgccgacccgggcctgctgggcatcagcagcggcgccgcgctggcggtggccagctggctagtgctcccgttctcccctgcggggctgatcgctctgtatatgccgatgctggcggcgtttattggcagcctggcggtgatggtggtgattttcatcctcagtcgggcggaggagggttcgctgtcgcgcctgctgctggtggggatcgccatcaacgcgctgtgcggcgcgctggtcggcgtcctgtcctggctgagcaatgacgcccagctgcgccagctgtcgctgtggggaatgggcagtctgggccaggccgaatggccgacgctgctggtggccgcgaccttgattatcccggcggcgctggcggtgtggtggatggcgtcccgcctcaatctgctgcagcttggcgatgaagaggcgcactatcttggggtcaacgtgcaggcgctgcagcgctggctgctgctgtgcagcgcggtgctggtggccgtcgcggtggccatcagcggagtcatcggctttatcggcctggtggtgccgcacctgatgcgcctgtggctgggacctgaccatcgcggactgatccccggctcgctgctggcaggcgcgatcctgcttctgctggccgacaccctggcccgcaccgtggcggcgccggcggagataccggtcggtctgctcaccagcctgctgggcgccccctggtttctgtggctggtctttcgtcgggagaactccagacatggttaatgaatactgcgcccaggggctgtcacttcaccttggtaaacgacagattatcgacaacgtctccgtcgcgctgcgcggcggcgagatgacggcgcttatcgggccgaacggcgccgggaaatccactctgctgcgcctgttgactggctatctgactccggacagcggcacccgccatcttgcaggcaagccgctggaggcctggtcccccgaggcgctgtcgcgccggcgggcggtcatgctgcagcgaacggccctgcaggccgactggacggtggaaacggtcattgccatgggacgctcaccgtggggcgcgacggcggatccggcggtgctggcggcggtgatggccgtcaccggctgcgatggccttgccggtcgccgctatcccggcctctccggcggcgagcagcagcgggtacagctggcccgctgtctggcgcagctatggcgcgacggcgcgccgcagggctggctgtttctcgatgagcccacctcggcgctggacctttactatcagcagcacctgctgcgtttgctcaaacggctcaccgccggcgggcaactgcacgtctgcgtggtgctgcatgaccttaacctcgccgccctgtgggccgaccgcatcctgctgctccaccagggacatctggtcgcccagggcacgccgcaggaggtgatccagcagccggttatccatcgctggtacggggcggatgtccgcctcgtccagcacccggacaacgcggtcccccaggtttatctggcgccgtaacccccgcgcggcgcaactggaatccggatcgcgccgcgcgctttcgtcggtttccctcacctgcccatctccgttattatgtctcatccatgtgataacgacgaaaactacaaaatcgcagccatttaaaatcagggatctggataacaccccatgagcacaattgacaatctcgacgcccacacgccgatgatgcagcagtatctcaagctaaaggcgcaacatcctgacattctgctgttttaccggatgggggatttttacgagctattttatgacgatgcgaaacgcgcctcgcagctgctcgatatctcgctgaccaagcgcggcgcctccgcgggcgaacccattccgatggccggcatcccccaccacgccgtagagaactacctcgccaaactggtcaatcagggcgagtcggtggccatttgcgagcagattggcgacccggccaccaccaaggggccggtcgagcgtaaagtggtacgtatcgtcaccccgggcaccattagcgatgaagcgctgctgcaggagcgccaggacaacctgctggccgccatctggcaggacagcaagggcttcggctacgcgacgctggatatcagctccgggcgctttcgcctgagcgaaccggccgaccgcgaaaccatggcggcagagctgcagcgcaccaacccggcggaactgctgtatgcggaagattttgccgaatcgtcgctgatcgagggccgccgcggtctgcgccgtcgcccgctgtgggaatttgaaatcgacaccgcgcgccagcagctaaacctgcagttcggcacccgcgatctggtcggcttcggcgtcgaaaacgccccgcgcggcctgtgcgccgccggctgcctgctgcagtatgtcaaagacacccagcgtacctcgctgccgcacatccgctccatcaccatggaacgccagcaggacagcatcattatggatgccgccacccgccgtaacctcgagatcacccagaatctggccggcggcaccgacaacaccctggcctcggtactcgactgtacggtgacgccgatgggtagccggatgctcaagcgctggctgcatatgccggtccgcgataccgccgtgctggtggagcgccagcagaccatcggcgcgctgcaggagcgctataccgagctgcagccggtgctgcgccaggtcggcgatctggagcgtattctggcgcgtctggcgctgcgtaccgcccggccgcgcgatcttgcccgcatgcgtcatgccctgcagcaactgcctctgctgcgtgagctcctggccgacgttgacagtcagccggtgcaaaaattgcgcgagaaaatgggcgagttcaccgaactgcgcgaactgctggagcgcgcggtgatcgacgccccgccggtgttggtccgcgacggcggggtcatcgccccgggctatagcgaagagctggacgagtggcgggcgctggccgatggcgccaccgattatctcgataagctggagatccgcgagcgcgagcggctgggcctcgataccctgaaagtcggctacaacgccgtccacggctactacatccagatcagccgcggccagagccacctcgcgccgatccactatgtgcgccgccagacgctgaaaaacgccgaacgctacattattcctgagctgaaggaatacgaagataaggtgctgacctccaagggcaaagcgctggcgctggaaaaacagctttatgacgaactgttcgacctgctgctgccgcatctcgccgatctgcaaaccagcgccagcgcgctggccgagctggacgtgctggtcaacctggcagaacgtgcggaaaccctgaactactgctgcccgacctttagcgataagccaggcattcgcattagcgaaggccgccatccggtggtcgagcaggtgctgaaagagccgtttatcgctaacccgctgcagctggcgccgcagcggcggatgctgatcattaccgggccgaacatgggcggtaaaagtacctatatgcgccagaccgcgctgattgcgctactggcctatatcggcagctacgtcccggcgcagaaagtagaaattggcccgatcgatcgcatcttcacccgcgtcggcgcggcggatgacctggccagcggccgctcgacctttatggtggagatgactgaaaccgccaatatcctgcacaatgccaccgagcatagcctggtgctgatggatgagattggccgcggcacgtccacctacgacgggctatcgctggcgtgggcctgtgcggaaaatctggccaacaaaatcaaggcgctgacgctgttcgccacccactacttcgagctcacccagctgccggagaaaatggaaggcgtcgccaacgtccacctcgacgcgctggagcacggcgataccatcgcctttatgcacagcgtgcaggacggcgcggccagcaagagctatggcctggcggtcgccgcgctggcgggggtgccgaaagaggtgatcaagcgcgcgcggcagaaactgcgcgagctggagagtatctcgcccaacgcggcggcgacccaggtcgacggcacgcagatgtcgctactcgccgccccggaagagacctcgcctgcggttgaggcgctggagaatcttgatccggactccctgaccccgcgtcaggcgctggagtggatctaccgtctgaaaagcctggtctagccacccattaaggtgaaaaacggcagcgctgtgaagcgctgccgttttagtaaacaaaaaatgggtgctagaggatgcgtcctgacaacccatacgcggggttgccctcgcgcggatgctacttcttcgattcgtaagcgagaacagctttaaactcaatattacgctctttaatactcagctcgcatagtgagctgtgcaccaacagcgtaaatcccagtaccgtaataaagagtacgacgattgccacaagggcatattttgcctccctgcaaagaagagactaacatctgaattgtctatgttcattcgctagcctcagttgatagaaatatctcctggggctttcgtctgtctggggtcctggtaatgctcaaggccagacagcctcaagcacccgccgcaattctacactcgtcagggcgtgaaatttatctgcaaggaattaatcagacgaattttataataatctggatgcaggctcgcaaagtcatcccggtatattaacccttcacgtaattttttaatttaatgaaaaaataatttccataattgtactaaatataaaaaaggcccgacttagcgggcccctttcattaacgcttatcttccggcaatagcggcggtacgtgcggcacctgcggcgcctcatcgatatctttctgcgtcatgcggaacgcttccggatagtgttcgcggctggtgcggcgcagcggctcggtatctcgccaggtgtaaagacagtgctggcactgatacacggtccagacccctttcaccggcgaggtcgccatgacttcaatcttttcatcggcgcaacgtggacaaatcatcttcttctccttatttacggttggccagcatagcggtcagtttttcagcccaggctttggtttccggcagatcctgcaccggctggctgtagtggccgcgaaggtccggcgcaaccggggtggtggcgtcgataatcagtttgtcggtaatgcctgccgggctggagcctgggtcaagttcaaggaccgacatgttcggcaactgcaccaggtctcccgccgggttaaccttcgaggagagcgcccacatcacctgcggcaggttgaacgggtcgacgtcttcatcaaccatgatcaccatcttcacatagccgaggccgtggggagtggtcatcgcccgcaggcccaccgcgcgggcaaaaccgccgtagcgttttttggtggagatgatcgccagcagaccatgggtgtacatggcgttgaccgcctgcacttccggaaattcggccttcagctgctgatacagcggtacgcaggtcgccgggcccatcagatagtcaatctcggtccacggcataccgaggtagagcgattcaaaaatcggtttgctgcgataagagactttgtcgatacgcactaccgtcatgttacgaccgccggagtagtgaccggtaaattcaccgaacggcccctcgatctcacgcttacgcccttcaatgaccccttcgaggatcacttccgaaccccagggcacgtcaaagccggtcagcggcgcggtagcgatgggatacgggctctcgcgcagcgcgccagccatctcatattcagactgatcgtatttcagcggcgtggcacccatcagggtaataatcgggtcgttaccgagggtaatggcgatcggcagatcttccccacgctcttccgctttgtgcagatgcagcgcgatatcgtgcatcggtaccggctgcaggccgagcttgcgcttgcctttcacttccatgcggtagataccgacgttttgcttaccgaagttatctttatccagcggatcgcgtgaaacgacacaggctttatcgaggtagaaaccgccgtcaccatcgttgaggcggaacagcggcagaatatcgaacaggttgatatcatcgccatcaacagtattttctgcccacgccgggttggcgcggcgctctggcgtcaccgggaagttatcccagcggcgaatgaactcatcaatctgctttttcaccggcgtgttaggcggcaggcccagcgagatggcatggttctgccacgagccgatggtgttcatcgtcacgcgagcgtcgttaaagccgcgaatattatcgaaccacagcgccggggcaccgtcgccgatgcgtccggtcgcattggcggccgccgccagatcgggctcagcgttcacctcttcactgattttcagcagttgtccctggtcatccagcgcctgcaaaaagctgcgcaaatcatcaaaagccattattcgatctcctgtgcaaattgttctgccgtgcgcaagccgttccagcggcgcgctttgtgatagtcgaggccaaactgatccagcacccgggtgacgatatgattggtgatatcgtcaaccgtctccgggtggttgtagtaagctggcatcggcgggaccatcgccacgcccatgcgggacagcgccagcatgttctccagatggatcgtgctgagcggcatttcccgcgggaccaacaccagcttgcgcccctctttgagcaccacgtccgccgcgcggcccaccagcccttcggcataacccgcgcgaatgcctgcaagcgttttcatactgcagggaataacgatcatgccgtcggtacgaaatgaaccggatgagatggtggcggcctggtctgccgggctgtgggaaaagtccgccagcgcggccacttcgcgcgccgtccagggcgtttccagctcgatggtggttttggcccatttcgacatcaccagatgggtttccacctccggcatatcgcgcagcgcctgcagcaatgccaccccaagcggtgccccggtggcccccgtcatcccaataatcagtttcattccagacctcattacttttgttcgtgtacgaactttatatttaaactaccccctccagcccttattggcaagatcgttcgtatacgtgcgcatttttaatcaaaacgcagaaagggtataaaaaggcgtacgaacggctatcatagaggtgacagttttgttacggagtattcatggagttacgaaacgaagcattccacctgctgcgccagctttttcaacagcataccgcccgctggcagcaggcgttgccggagctgactaaacctcagtatgcggtgatgcgctcggtagcggagcaccccgggatcgaacaggtggcgctgattgaagcggcggtcagcaccaaggctacgctggcggagatgctcagccgaatggaagcgcgcggcctggtgcgccgggagcacgatccggccgataaacgccgccgttttgtctatctgaccgacgaaggcgaggcgttgcttaaccgttccattccgcagggcaatgaggtcgatgacgagtttctcggccgcctgagcgatgacgagcgcgagcagttctcccggctggtgcacaaaatgatggcgccctgaacgggcgcttaaccgaccttctcgcgcaggaagtcaataaatgcccgcacccgggtcggcaaatgctgagagtcgggataaagggcatacacaccctgctgtgggaaatggtattccggcaggagcggcaccagctcccgctgcgccacctttttggctaccagccatgcgggcagcaaggcgacgccgcatcccgccagagcaaagctcatcagcgccgtagcgctatcagcagaaaaccgcggcgcgctggctatcgcgaaatccacctctgtctggtgatccgtgcgcagctgccagcgcagcggcgtcggcaggcgctcgtgaataatccactcagcttgcgccagatcggacagcgtctgcaccggatggcttgccagccagaccggagaggcgacgggcaggatcgcgaaactggctatccgcgtcgcccgatagcgggaatcggccagcgtaccgaggcgtatcgccacatcaaatcgttctgaaatgaggtcggcatgacgggaggaggagacgtggcgcacccgcagcgccggatgacgacgggcgaacgcggccagcgctggaatgataacctgctcgccatactccggcgtggtggtgatccgtagctccccgcttaagccgctatggctggcccgcacctcatcctggagattttccgccgcgttcaggagcgccaccccgcgctgatagaacagcaccccggcgtcagtgagccgcaaacgccgcgtcgaacgcagcagcagcgtcacccccagctcattttccagctgccgtacgttaaagctgaccaccgccttggtctgccccagcgccgctgcggccagggtgaaactgccggcatctaccacggcgataaacatggtcacgcgctgaagattaagcatcgtcgtccggatgattgtcaaaaatattcagacagtatatcccgattagtcccgtttatccctcgctgcggcaggtttacagtagccgcctgtctgagggagtgaaccatgacctaccgccaccgcgttgccaccgtttttctgttcggcttttttctcgatttgatcaatatgtttatcgccagcatcgcctttccggcaatcagccgcgcgctggcggtttccgtctcgcagctggcgtgggtcagtaatgcctatattctcggtctgacggtcgttgtgccgttcagcgcctggctcagcgagcgctggggggcgaaacggctgtttttactctcgctggggctgttcagcctcggcgcgctggcggcagggcttgccaacagcctgagcgaactgattttatggcggacgctgcaggggatgggcggcgggctgttaatccccctcggccaggcgctgacgtggccgctgtttcagccgcatgagcgggcgaagctgtcggcggcggtgatgctggtcggcctgctggcccccgcctgctcgccggcgatcggcggcctgttagtcgaggcgttcagttggcgctgggtctttttcgccagcctgcctgtcgctctgctaacctttgtgctggcggtgcgatggctgaacgacacccccggtccggttcgcccgactcgctttcttccactgtcgctgctggccgatcccctgctgcgcttcgcgatgctgatctacctctgcgtgccggggatgtttattggcgtcaacgtggtggggatgtactacctgcaacgcgtcaccgggatggcgccgggggcaatcggtgccctgatggtgccctggtcgctggcctcgtttgccgccatcacctttaccggcagatatttcaaccgcttcgggccccggccgctggtcgtcatcggctgcctgcttcaggcgatggggatcatgctgctgctgaagatcgatgcggacagcccgctggcgctgttgattctggcctttacgctgatgggcggcggaggcagcttatgcagcagcaccgcgcaaagcagcgctttcctgcatacgcctgccgaagagatgcctgacgccagcgcgctatggaatcttaaccgccagctcagcttctttgccggcagcgccctgctcgccctgctgctgagggtattcccgccggcctacgcctggcagggggtatttatcagcgccgccgtcattaccctgttgccgctgctgttttgcctgcggctgaataatcgggcgattatccatcgcctgcacaccactctggagaagtcatgaatccttatctgcaggaagtcctcgatgcccatgtccttatcgaacgctggttaagccatggcgaaggaagcgctgaggcgctgatgaagcgttttgccgccgattttaccatgatccccttgagcggtgagaagatggactacccaacggtgagccattttttccaccacgccggcggcagccgtccggggttagatatcgtagtggatcagatggaaatcatcagcgagtggcacgacggcgccgcagtgctatatcgtgaaagccaaacgctggcggatagcagccagaacgttcgctggtcgacggcgatttttcagcaagcggaagggaaaatcgtctggcgccatctgcaggaaacccgcctcggctagcccaaagaaaaaggccccgactttcgagggggcctttttgacagaaaacgtcttattcgcggaagagcgcttcgatattcagcccctgtccctgcagaatttcccgcaggcgacgcagaccttccacctggatctgccgcacgcgttcgcgggtcaggccaatttcacggcccacatcctccagcgtggcagcttcataacccagcagaccaaaacgacgtgccagaacttcacgctgcttggcgttcagttcaaacagccatttgacgatactttgcttcatatcatcgtcctgcgtggtgtcttccgggccgttctctttctcatcggccagaatatccagcagcgctttttctgaatcgccacccagcggagtatccacggaggtgatgcgctcgttcagacgcagcatacggctgacgtcatcgaccggtttgtccagctgttcggcgatctcttccgcgctaggctcgtggtccagcttatgggacaactcgcgcgcggtacgcagataaacgttcagctctttaacaatatggatcggcaaacggatcgtacgggtttggttcatgatcgcccgttcaatagtctggcggatccaccaggtcgcgtaggtcgaaaaacggaacccacgttccgggtcaaacttctcaacggcgcggatcaggccgaggttaccttcttcaatcagatccagcagcgccagaccacgattgctgtaacgacgggcaatcttcaccaccagacgcaagttactttcaatcatgcgacggcgtgaagcgacatcaccacgcagtgcgcgacgcgcgaaatagacttcctcttccgcggtcagcagtggggaataaccaatctctccaagataaagctgagtggcgtcaagtacgcgctgggttgcgccttgcgacagcagctcttcctcagccagatcgctatcactgggttcctcttctactaaggctttctcgtcgaaaacctcaattccgttctcatcaaattccgcgtcttcatttaaatcatgaactttcagcgtattctgactcataaaggtggctcctacccgtgatccctgagcaaagcaccttccacggcacatcaacaaacgacgcctggacgatttcccctgccctctctgcgagaggaacgtagacaccgccctggcgcctgttagctgatgcttcgcttatccgtactttgccaaattatcgctgcggtaagtactgcagcgggttgacggatttccccttgtaacgaatttcaaaatgtaatcttgttgagctggttccggtgctacccatggtagcgattttctgccccgctttgacttcctgttgctcccgaaccagcatggtatcgttatgagcgtaggcactcaggtaatcatcgttgtgtttgatgataataagattaccgtagccgcgcagtgcgttaccggcatagacgacgcgcccatcggcggtcgcgacaatagcctgtcccttactgcctgcaatatcgatacctttattgccgccttccgcgccgctaaagttctcgataaccttgccatcagtcggccagcgccatgctgagatcggcgaactggttgacgtactgcttgcagtcggctgggttgtgctcaccgttgttggtgccgtcaccggcgcgacaaccgttgtggttgtggtcgctggtttattattaggcaacatcttggtagcactctgttcacctgaagattcagaatacgtaatagtcggttgtgaagcaaccaccgcggtcgatttttgtgcagaagttgtgctggtcgtcgcaccgccgctcgctcttgcgctggcctgagaaacggcgttttcgccggtgatcggctggcctgaggcgttaccgacctgcagtacctgccccacgttcagcgcgtacggggccgggatgttgttgcgttgcgccaggtcgcggaaatcgttgccggtgacccaggcgatatagaatagcgtgtcgccgcgttttaccgtataggtactgccgccggtatagctacctttcggaatatcgccatatttgcggttgtaaacgatccggccatttaccgtctgtaccggctcctgcgccaccggcgccggctgcggctgaatggtctgggtctgcatcggctgaatcggctgcgcctgaggagcggacttgacgccggagggtggcggcgtaatcagcatgccggagttggtgctggaagaggcggcgccgccggcagagctaaccggcgcaggcggattattggtgttggtacacccggccagccagagtgaaaccagtgaaagagccgcaatacggctgacggtaaatttggtgcttcccgcgctcatttatcccccaggaatatgttaactgccaatatcttgcttaccgggcggcgcccggccaggacactgaaaaatgtgtccaccctacgcctaaagtcaggcaaaaaaaacctggaataatccgggtctcaggccagctcccccttcaccaggggaacaaagcgaacggcctcgacggtatcaatgataaattcgttgccccgacgacggatccgtttgagaaactgatgctcttcgccgaccggcagcaccagcacgccgtcatcatccagctgcgccagcagcgcggtcggtatttccggcggcgccgccgtcacaataatggcatcaaacggcgcccgcgcctgccaaccttgccacccatcgccatgacgggttgaaacattatgtaaatcaagttgtttcaggcgacgacgcgcctgccactgtaaactcttaattcgctctaccgagcatacgtgatgcaccagatgcgccaggatggccgtctggtagccggaaccggtgccgatctccagcacccgcgactccggcgtcagcgtcagcagctcggtcatccgcgccaccatatacggctgggagatggtctgcccctggccaatcggcagcgcggtgttttcccacgctttatgttcaaaggcttcatcaacaaacttttcgcgcgggaccagcgcgatcgcctcgaggacacgttcatcgacgatgccctgcgtgcgcagttgattcaacaaactttcaacacgtttacttaccattgcctgtcaaccccgacacgttccagccaatcggtgaccacctcatgcgcctgatgggcggttaaatcgacgtgcaatggcgtcacggaaacatagccttcatccactgccgcaaaatcggtgcccggcccggcatcgcgcttatcgcccggcgggccaatccagtacagggtgttgccgcgaggatcttgttgcgggatcacctggtcggccggatggcggttgccgcagcgggtcacgcgaatgcccttgatttgatcaagcgggagatccggcacgttgatgttaaggatccgcccggtacgcagcggctcgcggcttaaggcgcgcagaatggtgcaggttaccgccgcggcggtatcgtaatgctgatagccgttcagcgacacggccagcgcggggaaccccagatgacggccttccatcgccgcggccacagtgccggaatagatgacgtcgtcgcccaggttggggccggcattaataccggaaaccacgatgtccggacgcgggcgcatcagcgcgttcacgccgagatagacacagtcggtcggggtgcccatctggacggcgatgtcgccattttcaaaggtaaacgtacgcagggacgattccagcgtcagcgaatttgaggccccgctgcggttacgatcgggtgcaaccacctggacctcggcaaactcccttaaggccttcgccagggtctgtatccccggcgcatggatcccgtcatcgttactcagcaatattcgcatagtcacccgttgtattgataagctccctgaccacgctggtggcgaagctgcccgccggcagccagaaacgcagttcaacggttacgtcatcccaccagttccagctgagctgctgtggatagagaagcatcgcccggcgcgccgcctcgactttctcccgtaccagcagcgcctgcaacgcggtttcctcggcgatcgcggcctgctcgaaagccagggcgtcgcgctggcttccccagtcgccgctgcccggcagcgtggccgtaatcatcagttcgcggttatgcacccgcgcctgcgaaacctcgagttcttccggtgtgacgacaaaccagctcccgcgccccgctaattgtagcgcatcgccatcaacgacctgattaaattccgttttttttaatctaatactcacttgctgattaaacaacgcgctgcgggctgccgacaaccaaaaactgcgcttattgcgatcgcgcactggcgcgccgctctccgcccagcgcagggcaccctgcaggttactgccgccaatgccgaagcgctgcgcgccgaaatagttcggcactccccgttcagcgatggcctgcagacgcgtctccacgtcctggcgatcgctaatctcgcgcaggatcacggtaaactggttgcctttcagcgcgcctaaacgcagcttacgcttatggcgagcatattccagtacctggcagccctcgagctgaaatttgctcaggtccggcatctctttgccgggcacccgggcgcacagccactgctcggtgaccgcgtgcttatctttttgcccggcgaagctcacttcacgggcgtggatcttaaggaatttcgccagcgcgtcggcgacaaagcgcgtattgcagccgtttttcaggatccgcaccagcacgtgttcgccttcgccgtccggggcaaatcccagatcttccaccaccagaaaatcttccggattggctttcagcagcccactgctctgcggcttgccgtgcagccaggtcagttggtcaaaggcgatcatttgtcggccttacgcagcagcgcaaccgcttcgcaggcgatcccttccccgcggccggtgaagccgagcttctcggtggtggtcgctttcacgttgacgtcgtccatatggcagccgagatcctcagcgataaagacgcgcatctgcggaatatgcggcagcattttcggcgcctgggcaataatcgtgacgtcgacgttgccgagcgtatagcccctggcctgaatgcggcgccatgcttcgcgcagcagttcgcggctatcggcacctttaaacgccggatcggtatcggggaacagcttgccgatatcgcccagcgccgcggcgccaagcagcgcgtcggtcagcgcatgcagcgcgacgtcgccgtcggagtgggccagcagccctttttcataaggaatgcgtaccccgccaatgatgattgggccttcaccgccaaaagcgtgtacgtcaaaaccatgtccaattcgcattaagctttctcctggtgtcgggaacgggtgaggtaaaattcagccagcgccaggtcttccgggcgcgtcactttaatattatccgcgcgtccggcgaccagctgcggatggaagccgcagtactccagcgccgaggcttcatcggtgatagtggctccctcgtttagcgcgcgagtgaggcaatccaccagcagctcgcgagggaaaagttgcggggtgagcgcatgccacaggtcattgcggtcgacggtatgggcgatagcggttttgcccggctcggcgcgcttcatggtgtcgcgcactggcgccgcaaggatcccgccgacgcggctggtttcgcagagcgacagcaggcggctgaggtcgtcctgatgcaggcaggggcgcgcggcgtcatgcaccagcacccactgcgcctccggcaacgcccgcaggccggcgagtaccgaatcggcgcgctcagcgccgccatccaccacggtaatctgcggatgctgcgccagcggcagctggctgaagcggcgatcgccggggctgacggcaatcaccacccgctggacgcgcgcatccgccagcagcgcggcgaccgcgtgttcgagaatcgttttgttaccgattgagagatattgtttcgggcattccgtttgcatgcggcggccgaaaccggctgccggcaccacggcgcaaacgcccggaaaagtggctgccatgttgtaatcctgggcctggttatcgattgttctgctgttgccccgatgcctgattgcgtttagacgcatccggtaccagacgatagaaggtttcgcccgggcgggtcatgctgagttcattgcgcgcacgctcctcaatcgcttcctgcccgccgttgaggtcgtcaatttcggcaaacagctgatcgttgcgtgcttttaatttggcgttagtcgcctgctgggcggtgacgtcgtcgttaacccgcgtgtagtcgtgcaggccgtttttaccgaaccacagcgaatactgtagccagaccagcaaagctaataatagcagcgttagtttacccatcctgccccctgaaaaacggcatcatcatcccaaaactcgcccgggtacgctaccggggcgcgcggacgatgccgcgtaacgcggggactgtaccatatttttgctgtcgatacccatgcttgattcataccagcaacgggttatcccaacagccagaggaagagtagcgcaaacatcagcccaacggtcaggatggtcgcgctgacgctatagagcagtttgccattgagcagagagtgcagcgcaataccgaccaccaccgccaccggcatcaacgcaaggaagaatggccaggtgtagaggagaaagaagagtgtattactgccatagagaaggaagggaatacccagcgccagcagccacgaaataaagcccacggcagcgcccgacaaagaccaggtggtctcgtcgccgatcgccggaggcggttctgaacgaataatactgaggttctgggtattgcgcatatcgaatcctgtagaccgggcaaccggcacccctcgatgccgctgccgtttcaggatctgataatatcgctctgttgcagcaggtctaatagttggtgcaccaaatttgttaccaattgttcaccatccagatgaatttccgccttttccggtgcctcatagaccgagtctataccggtgaaattgcgtaattcccctgcccgcgctttcttatacaatcctttcggatcccgcgcctcgcagatggccagcggggtatcgacgaacacttcgataaagcgtccttccccgaggcgctcgcgcaccatctgccgttccgcacggtgcggagatataaatgccgtcaataccaccagcccggcatcgaccatcagcctggccacttccccgacgcggcgaatgttctctttgcgatcctcatcgctgaatcccaggtcgctgcacaggccatggcgcacgttatcgccgtccagcagataggtgctgacgccgcgctcatgcagggcctcctccagcgccccagcgacggtggatttacccgaccccgaaaggccggtaaaccacagcaccacgccgcgatggccgtgatgctgttcccgctgctgttgggtcacagggtgggcatgccagacgacgttttcgtcatgctgggccattatttgcctcccagcaggtcgcgggcgtcccagtgcgggaaatgtttacggatcagctggttcagctccagctcgaaggcgctgtactgtgatgccgaagtcgatgcctgcaggtgcggctcgttgaccatcccggcgccgacggtgacgttggtcaggcgatcgataaagataagcccgccggtcaccgggttttgctgatacggatccagcactaaaggttcgtcaaaggtcagctccaccaggccgatgccgttcagcggcagagactcgacttcacgctgggtcaggttgttaatatcgacctggtagcggatagcgtcgacgcgagcgcgggtcttcttgccggcgattttgatgtcgtagctctggcccggggtcagcggctgttcggccatccacaccacgtcgatgctggcgctttgtaccgccggcagcgaggcttgcgcgtcaaccagcaggtcgccgcgactgatgtcgatttcatctttcagcacaagggtaatggcttcgccggcggcggcttcctgcaggtcgccgtcgaaggtgacgatacgcgccacgctcgattcgacgcccgacggcagcaccttcagacgctggccaacctgcacggtaccggaggcgaccgtgccggagaagccgcggaaatcaaggttcggacggttaacatactgcaccggaaagcgcagcggctggctctcgaccacccgctggatctccacggtttcgaggacttccagcagcgtcgggccactgtaccacggcatattcgcgctctggctggcgacattatcgccttccagcgccgacaacggcacaaagcggatatcaaggttgcccggcagctgctcggcaaaggtcagataatcttcccggatctcgttgaagcgcgcttcgctaaactcgacgagatccattttgttgaccgccactaccaggtgtttaatgcccagcagcgtcgagatgaagctgtgacggcgggtctggtcgagcacgcccttgcgcgcatcgatcagcaggatcgccaggtcgcaggtggacgccccggtggccatattgcgcgtgtactgctcgtgccccggggtgtcggcgatgataaatttgcgtttttcggttgagaagtagcgataggccacgtcgatggtgatgccctgctcgcgctcggcctgcaggccgtccaccagcagcgccaggtccagcttttcgccctgggtgccgtgacgcttgctgtcgttgtgcagcgaagagagctggtcttcatagatctggcgcgtatcgtgcagcaggcggccaattaaggtgcttttgccgtcatcgacgctgccgcaggtcaaaaaacgcagcaggctcttgtgctgttgcgcgtgcaggtaagcttctacgccgccttcgttggcaatttgttgggcaatggtcgtgttcatggcggctccttagaaatacccctgacgtttcttcagctccatcgagccggcctggtcgcggtcaatgacgcgcccctgacgttcgctggtggtcgataccagcatctcttcaataatttcggggagcgtctgcgcttcagactccaccgcgccggtcagcggccagcagccgagggtacggaaacgcaccatccgtttttcaatcacctcgcccggctgcagatcgatacggtcgtcatcgatcatcatcagcataccgtcgcgctccagcaccggacgctcagcggccagatacagcggcacgatttcaatattttccagatagatgtactgccagatatccagctcggtccagttggagagcgggaagacgcggatgctttcgcctttgttaatctggccgttgtagttgtgccacagctccggacgctgatttttcgggtcccagcggtggaaacggtcgcggaaggagtagatgcgctctttcgcgcgggatttctcttcgtcgcgacgcgcgccgccgaacgcggcgtcaaagccgtatttgttcagcgcctgcttcaggccttcggttttcatgatatcggtatgcttggcgctgccgtggacaaacgggttgatgcccatcgccaccccttccgggtttttatgcaccagcagttcacagccgtaggctttagcggtccggtcgcggaactcatacatctcacggaatttccagccggtatcgacgtgcagcagcgggaacggcagggttcccggataaaacgctttgcgcgccagatgcagcattacgctggaatctttcccgatggagtacatcattaccgggttagaaaattcggcggccacctcacgaataatatggatgctttccgcctccagttgccgcaggtgagtgagtcgtttttggtccataaccgttccttaagccagattgaccaccgaagcgttaaacccctcggcggatgatgtatgttgaaaccaggcgagctgctgatgcagctgcaccacttcgcctaccaccagcagggcgggcatcggggcgtctttcgccaggtgttcgagttgttgcaatgtgccggttatcgtctgctgatcgtcacgggtgccacgggaaatcaccgccaccggcgtgtcgctgtcgcgaccgtgggcgatcagctgggcgctgatttccgccgccttcatggtgcccatgtagatcgccagcgtctgttggctcttcgccagcagcgaccagtcgaagggggcgctgtccggcttatagtggccggtgacaaagacggcgctttgcgcataatcgcgatgggtcagcggaataccggcgtaggccgtcgccccggcggcagcggtgacgcccggcaccacctggaacgggatccccgcctcggcggcagcctgcagctcttctgcgccgcggccaaaaataaacggatcgccgcccttcaggcgcacgacggttttccccgccttcgccgcctccaccagcagctgattggtttcatgctgcggcaccgagtgctcgccggcgcgtttgccaacgcagatcagctcggcatcgcggcgcaccagctcgagaaccggctgagtcaccagatggtcgtggaaaaccacgtccgcctgctggatcgcctgcagaccgcgaagggtcatcagcccggcatcgcccggcccggcgccgaccagaataatttctcccgtctcgcgttcgggcttatccagctcatcctgcagcgccttttccgcctccgcagagttgcccgccaccatcaggctggcgaagcggccggtaaagacgcgctcccagaagcggcgacgcgcttcggtagtcgtcaggcgggttttcagatggttgcgccagtagcttgctgattccgccagccgaccgagattcgtcggcagcagcgcttcgattttttcacgcagaatgcgcgacaacaccggcgctttaccgctggaggagatcgccaccagcagcggcgaacggtcgacgatagaagggaaaacaaacgagcacagcgcctggttatccaccacgttgaccaaccggtagcgcgcgttagctgccgcaaatacccgctggttaagcgcctcatcctcggtggccgcaatcaccagaaagacatcatccaccagcgagtcgctgaattccgtcgcccgccagctgagtgcctggcgcgcagccagatcggccagcgccggtgacagcgtttcagcgaccacctgcacctgcgcctgggcgcgcagcaagaacttgatcttacgttcagcaatctcgccgccgccgatcaccagcacgggcctttgtttcagttcggcaaaaaggggcaagtaatccacggtgcaacaactctcttacattcagcgatactgcgactatagggtgcgccttagagcaaatgaaattacgaaatggaatgagttgtgacacaaaggaataacgcggcggaaatacaaatatcaaaaagtgcttaacgcgctatttttccgctatttaagagcaattgaaattgtttaaccgcggtcacagtttcatactgtacgcgtcaaattgtcttgttcgtgtaaggaccccttatgttttccgcgttgtgccgccgtctgcttccgctggcgctcggcaccggttttgtttttgccgccgcccccgcattcagcgcgctgggcgacaccgccagtagccaggcccgccatatcgccaccgtcttcccgggacgaatgaccggaacgccgccggaaatgctctcagctgactatctgcgccagcagttcgccctgatggggtatcagagcgacgtgcgaagcttcaatacccgctatatctataccgacagcaatcagcgcaagaactggcataacgccaccggcagtacggtgatcgccgcccatgaaggtaaagtgcgccagcagattattatcatggcacacctcgacacctatgcgccgcagagcgataaagacgtggagaacaacctcggcggcctgacgctgcagggcatcgacgacaacgcgatgggacttggcgtgttgctggagctggcggagcatttaaagaacgtccctacccgctatggcatccgctttatcgccaccagcggtgaagaggaaggccgtctcggcgcgcaaaacctgctgcagcggatgagcgaagcggaaaagaaaaataccctgctggtgatcaatctcgataatctggtggtgggcgataagctttacttcaacagcggccgcagcacgccggcctcggtgcgcaagctgacccgcgatcgcgcgctggctatcgctcgcagcaagggcatcgccgcctacaccaacccgggactcaacccggcttatccgaaaggcaccagctgctgcaatgacgccagcgtcttcgacaacgccgggatcccggtgctgtcggtcgaggcgactaactggtcactcggcaaaaaagatggctatcagcagcggagcaaatcggccagtttcccgcagggaaccagttggcatgacgtccagctggataatcagcagtatatcgaccacgcgctgccggggcgcatcgaacaccgcggacgcgaggtagtgaaagtcatgctgccgctggtgaaagagctggcgaaagtggagaagaaaagctaatacgcacaaaagaacgcgcggtatcgcccgcgtgttctttttgaattatcactcagaggaagagctaacagcttaaccctcgtgcaatccgcactcgcgtttaagcccgaagaaccgggtctcttcttctgccatgcccggctcccacttgcgggtggtgtgggtatcgcctaccgagagatagccctgatcccacagcgggtggtacttcagcccgtgcttttgcaggtactgatacaccgtgcggttatcccagtcgataatcggtagcaccttgaacaccccgcgctggaccgccagcaccggaagcgtagcccggctgcccgactgctcgcggcgcagaccggcaaaccacgtctgcgcgttgagctctttcagcgcccggttcatcggctcaaccttgttgatctcattgtatttctcaatgccctcaacgccctgctcccacagcttgccgtagcgcgcctcctgccaggccgcgctttcagccgcgcggtagaccttcaggttcagcttgagcttgtccgtcagctcgtcaataaactgataggtttccgggaacaggtagccggtatcggtgaggatcaccggaatgtccgggcggatctgattcaccagatgcaaactgaccgccgcctgaatgccaaagctcgacgacagcacatagtttcccggcagattttccagcgcccacgccacacgcccttcggcgtcaagcttttccagttgggcgttggtttccgcgagtgccagaatgcgttccactttcggcaatgcattaagcgcgtttagatcgagtacggacatatgaacctcgtttgcctgttttgccggacgacactgcgttcgtccggcctacgggtttcgctggcccggatcgctacgcgccaccgggcaccaggatgttattcccagaaatcgcgggctgggtcgagcaccgggcgaatgatgcccgcacgcaccgtaaaatcgccgaagccttcacccgcttcgcgctctttcgcccagcgccctaccagttcgtctagcgagtcgagaatttccgactcggtaatattctcacggtacatccgcgggatgcgggtgccgttgcggttaccgccgatgtgcaggttatagcggcccggcgctttgcccaccagtcccacttccgccagcatcgcgcggccgcagccgttcgggcagccggtgacgcgggtgacgatatgctcatcgctcacgccgtgcttgctcatcagcccttccaccttgtcgataaacgacggcaggaaacgctcggcttccgccatcgccagcgggcaggtcgggaaggagacgcaggccatcgagttttcgcgctgcggggtgacggcattcatcaggccatgatcccgcgcgagcttctcgatccgcgccttctgatcttccggtacgctggcgacaatcaggttttggttagcggtgatgcggaattcgccttgatggaccttagcaatctccagcaggccagtcttcagcggacgacccggataatcgagaatgcggccgttttcaataaacagcgtcaggtgccacttatcatcaatccccttcacccagccgatgcgatcgccgcggccggtaaattcgtacgggcggatcggctcaaacttaatgcctgcccggcgctccacttccgctttgaaggtttcgacaccgacgcgctcaagggtgtacttggttttcgcattcttacggtcggtacggttgccccagtcgcgctgggtggtcacaaccgcttccgccaccgccagcgtatgctccagcggcagataaccgaattcgctcgccgtgcgggcgtaggtttttttgttaccatgttcgatagagagaccgccgcccaccagcaggttaaagcccaccagcttgccgttttcggcgatcgccacgaagttcatgtcgttggcgtgcagatcgatatcgttctgcggcgggatcaccaccgtggttttaaacttacgcggcagataggtctggccgaggatcggctcttcgtcggtagtggcgacctttttctgatccagccagatctcggcataagcgcgggtacgcggcagcagatgctcggagatctttttcgcccactcgtaggcctcagcgtgcagctgcgactcgtaggggttggaggtgcacagcacgttacggttcatatcgttggcggtggccagcgcgtccagccccaccgagtgcagcatctgatgcaccggcttgacgttctttttcagaatgccgtggaactgaaaggtctgccggttggtcaggcgaatactgccgtaaatggtgttctcagcggcaaacttatcgatcgccttccactgggtggtggtgatcaccccgcccggcagacggcagcggagcagcatcgcatgacgcggctccagcttctgggcggcgcgctccgcgcggatatcgcgatcgtcctgctggtacatgccgtggaaacggatcagcaggaagttatcgcctttaaaaccgccggtcagaccgtcgtttaaatcttccgcaatggtgccgcgcaggtagttgctctcaagcttcatgcgctcggcatcgctcagtttaccttcgaccactaaaggccccggatgtttttcgctcattagtagacatctcgctgataacggcgctcaacgcgcagctcacttaaaaattcgtccgccgcttcggcgtccatcgcgccgtattcggcaatcacttccagtaaggtgttttccacgtccttcgccatgcgattggcgtcgccgcagacataaatgtgggcgccgtcattgatccagcgccacagctcggccccctgctcgcgcagtttgtcctgaacatagattttttgttgttgatcgcgggaccaggccagatcgatacgggtcagcagaccttccttcacatagctctgccactccacctgatagaggaaatcttcggtgaagtgcgggttgccgaagaacaaccagttcttgccttgcgctccgtccgcagcgcgctgctgcataaaggcgcggaacggcgcaataccggtgcccgggccaatcatgatcaccggggtctccgggttggctggcagacggaagttgtcgttgtgttcgataaagacacggacttcgccatcctcttccacgcggtcggcgaggaaactggaggcgccgccagcccgggcgcggccttcaatttcatagcgcaccacgcccacggtgacatgcacctcgctctccacttccgcctgtgaggaagcaatggagtacaggcgcggcgtcagcggacgcagcagaccgattaacgcctcagcgtccagctgcgccggagagaaacggaccatatcgacgatcggcgtcgcggcggcatactgctgcaactgagctttatcgcccaccagcggcagcagcgattcgctgcgcgtcagggtggcgtagttttcaacgatagtcgcggtgttaaccgtcagctcaaaatgccactgcagggcttccgacagcggcagagttttgccctcaacggtcaccggctcgtcgcctttcagccacagcagctccaccagctctttcaccagctgaggatcgttctggtaccagacgcccagggcgtcgcccggctgatagcgcagaccggaatcaccgaggtctatttcgatatggcgcacatctttttctgaattgcggccggtgattttctgattgaccgacagggtcgccgtcaggggcgcttctttggtatatgggctggtgtgaatatcgttcaccgcgccgctggtggccagctgagcgggcgcagcgaccggcgcacgggccttcagcgcctcaaccacgcgcgcgcgccattcagcggccgcggcctgatattcaacgtcggcatcaacgcgatcgagcagacgttccgcgccgagctcggccagcttgttgtcgaaatctttgccggactgacagaaaaattcataagaggtatcgccgagaccaaagacggcgaacgcggtcccgtccagcttcggcgctttcttagagaacaggaacttatgcaatgcgaccgcttcttccggcggctctccttccccctgggtggacgtcactaccaccagcagtttttccgcagcaatttgtttgaatttataatcgcctgcattcaccagcttcacgttcagcttcgccgccagcagatcgtcacgcagcgcttcggcgacgcggcgggcgttgccggtttgcgaggcggaaatcagcgtgatcgtcggtacctcggcggccggggcgggttcggctaccgccgcgccggactgctgattcagcacgccccagaaatagccagatacccaggcgagctgagtgggcgtgaagtcagtggtggccgcctgaaggcgcgccagttgctccgggttgagcggtagcaagttggaaggtggggcctgtgtcgtcatgcgtcgtttgttccagtaagcaaagctgttattcgcaccctgtcagcgcgacaaaaacagaagagaatagaaggttaacggcgggcatagtaacaattaaagaagggatggaaataataaataaccaaatggactaacctgttttagttgtagttattaacaacaaaatcgattaaataagcaattgaaatataagagattaactcaaataaagcagatgaacatgtctattttctgttcacggccgttttagttaatgcgaaaaaatgtactttccggtaccctacggcggtttttttcgtcctgttgagagtcaatgatgtccaccacgctgtttaaagatttcaccttcgaagccgcccaccacctgccgcacgtcccggaaggacacaaatgcggtcgcctgcatggccactcctttatggtgcgtctggagatcaccggtgaagtcgatccccataccgggtggatcatggattttgccgagctgaaggccgcctttaagccgacatacgatcgcctcgaccactattatctgaacgatatttctggtctggaaaaccccaccagcgaagtgctggccaaatggatctgggatgagatgaaaccgcgggtgccgctgctcagcgccgtgatggtcaaagagacctgcaccgccggctgcgtctatcgcggcgagtaagcgaaaaaaagcccggtcagtacgctgccgggcttttttatcaggcaatattcagatacttgtgcgtctgcatagacaggcgccagttgcgggcgatgcaggtatcgatacacaggcgcgtcgcatcttctttctgactgatcggctgcagggcgatgatccgcggtttgtcatcgctcagcgtttccagcagttcgtccagcgcttctatgtcgcggacgcgccctaccggatgcttgatctcatccgcccgctgcagggcctgagacagcacgtcatagccaccgcgcatgttgaccttcggggaaaccgtcacccaggtattggggctgcagcgtacttcatgggtgccgctggtttcaatctgacagctaaagccgttttgttccagaagcgaggttaacggcgttaaatcatgaatgcagggctcaccgccggtaataaccacgtggcgggctgtccacccctgccgcccaataatcgccagcagatcctcgctgcttgccgggccccacttgtcgctctctttggttttcgccaggatgctgaacaacgacacttcccgatcggccagcttgtcccaggtatgcttggtgtcacaccacgcgcatcctaccgggcatccctgcagacgaataaagatggcaggcacgccggtgaagtaaccctcgccttgcagggtctggaacatctcgttaatcgggtactgcatagtcatctctgtttagggtgataaacgttcattatcgcagatttcgctgcccaggtcttgtcctgcgctgcgatcgcttttttacccctccgtcaatatccgtgtcgggaataatattattgattaaaaaagcaatcttttcttttggcttagtttattagcatggtaagaattaaaataaatagcattctgacgcgcggggggaaatatgtaacagaaaatgttattcctgtcattcaggataaaataaaaggtccaagaaccaaaataaaaaaccttaaaatacagtaatgtacaaactgatacatgaaagagtgaattatctggccgatctgcgagtccaattctatcccccggtaataataaccttaaactggtcttaataaagccctgatcgggccccttttttatttaattgtcgtttacttttgcccgcctagaatcccgcagaccaaccataatgagatagcgtttatgaccacattattaattaccggcgttacggggtttctgggcggtgccgcgttagagaaaatactccatcaggaaacccggttagatctgctgctgctggtacgtgctgatagccccgaggctggcctcgaacgggttaaagagaacatgcgtaagttcaacatcgccgaggagaagctggcgatgttgcgccagcagcatatcctgctgggcgatctcgcctctccggagcattttcttaacgatccgcgcctcgatcaggtcacgcacatcctcaactgcgccgctgtcgcttcatttggcagcaacccgcttatctggaaggttaacgttgagggcacgctgcgcctggcgcaacgtatggcgcaggtgacgggtctgcagcgctttctgcacgtcggtacggcgatgtcatgttcgcctgaaccggattcactggtcgccgaaagcgcggagtttcgggaacgcgctgagcacctggtggaatatacccactcgaagtcgaccatcgagcagctgatgcagcagcagtgccctacgctaccgctggtaattgcccgcccctctatcgtggtgggtcatacccatcacggctgccggccttccagcagtattttctgggtgttcagcatggggctgatgctgcagaaattcatgtgctccatggaggaccgaattgacgttatcccggtggactactgcgccgacgccctgctaatgctgcttaaccagcctctggctcacggcgaggtggtgcatatctctgctggcgaagagaacagcgtgaagtttgccgaaatcgacctggcgatggctcaggccctggagcaggcgccggtgggggataagtacgcccaggtgagctatgaaacgctggtcaaaatgagacgcgaactgaaagggatatttgggccatgcaatgagcggctgatgctgaaagccatgcgcttatacggcgcattcgccaccctgaacgtgcgctttagtaacgacaagctgctgagcatggggatgccaaaaccgccgcgctttaccgattacatcgaccgctgcgtggaaaccacccgcgggttgtcgatccctcagcaaatggccgtcgactttaaataatggccgcaggcgtaaaaaaaatgccagcccgaaggctggcatgattatttcacaaggacaggattaagcctgacctttgatctctttacgaccgttgaacggcgcttgctcacccagcgcttcttcgatacgaatcagctggttgtatttagcaacgcggtcagaacggctcatagaaccagttttgatctggcctgcagcggtaccaacagccaggtcggcaatggtagcgtcttcagtttcgccagaacggtgagagataacagcggtgtagccagcgtctttcgccatcttgatagcagccagagtttcggtcagagaaccgatctggttgaacttgatcaggatggagttagcgatgcctttttcgatgccttctttcaggatcttggtgttggttacgaacaggtcgtcaccaaccagctggattttgtcgcccagtactttggtctggtaagcgaaaccttcccagtcagattcgtccagaccatcttcgatggagacgatcgggtactgtttggtcagctcttccaggaagtgagtgaactcttcagaggtgaacgctttgttgccttcgccagccagaacgtatttaccgtctttgtagaattcagacgccgcgcagtccatcgccagggtgatgtctttgcccagctcgtagcctgcagctttaaccgcttcagcgataacagccagcgcttcggcgttggaacccaggttcggcgcgtagccgccttcgtcaccaacggcagtgttcatgcctttggacttcagcactttcgccaggtgatggaacacttcagaacccatgcgtactgcttctttcagggtcggcgcgccaaccggctgaatcatgaattcctggatgtcgacgttgttgtcagcgtgctcaccgccgttgatgatgttcatcatcggaaccggcatggagtatttgcccggagtgccgttcagttcagcgatgtgcgcgtacagcggcaggcctttggacgcagcagctgctttggcgttcgccagagaaacggccaggatagcgttcgcaccgaagttagatttgttttcagtaccgtccaggtcgatcatgatcttgtcgatgccagcctgatctttagcatctttgcccaggattgcctgagcgatcgggccgtttaccgcagcaacagctttggttacgcctttacccaggaaacgggatttgtcgccatcgcgcagttccagcgcttcgcgggaaccagtagaagcacctgacggagcagctgccataccgacgaaaccaccttccaggtgtacttcggcttcaacagtcgggttaccacgggagtcgatgatttcacgaccgatgactttaacgattttggacattaggttttcctcagtacaagttaaactaaaactccagacaaacaatgcacccggatgggtgcattgccgttcaaactctttttacttcgcctggcgtttctggtactcgctcgcggctttcacaaagccggcaaacagcgggtgtccatcacgcggcgtcgaagtaaactccgggtggaactggcaggccacaaaccacggatggttcggcacttcgatgatctcgaccaactgatcatccccggaacggcccgcaacgcgcagaccggcagcttcaatcggtttcaacaacatgttgttgacttcgtagcggtgacgatgacgctcggtgatggtcggctcgccgtaaagctggcgtaccagagaatcatcactcagctggcactgctgcgcgcccaggcgcatggtgccgcccagatcgctcttctcagagcggacttcaacgttgccatcttcgtcacgccattcggtaatcagggccacgaccgggtatttacagtctggcacaaattccgtcgagttggcgttttccatacccgctacgttacgcgcgaactcaatcagcgcaacctgcatacccaggcagatgcccagataaggaatattgttttcacgcgcatagcgcgcggtggcgatcttgccttcaacgccgcggtagccgaagccgcccgggatcaggatagcgtctaaatccttgaggatttcgacgccgcgcgtttccacatcctgcgaatcgatcagcttgatgttgacggtaacgcgatttttcagaccgccgtgtttcagcgcttcaatcaccgacttgtaggcatccggcagttcaatgtacttaccgaccataccgatggtgacttcgcctgccggattagcttcttcatagattacctgttcccattcggccaggtttgcttccggacaagttaagctgaatcgtttacaaatataatcgtccagcccctgagatttcaacaggcccggaattttataaatggaatcgacgtctttcagagaaatcacagccttttccggaacgttacagaacaaagcaattttggctcgttcgttggccggaaccgcgcgatcggagcggcagatcagaatatcaggctgaataccgatggagagcagctcttttacggagtgctgggtcggcttggttttgacttcgcccgcggcggccatgtacggcaccagagtcaggtgcatgaacagggtatgctcgcgaccgatctctaccgccatctgacgaatcgcttcgaggaacggcagggattcgatatcgcctacggtaccgccgatttccaccagcacgacgtcatggccttcgccgcccgccagtacgcgctctttgatagcgttggtgatgtgcgggataacctgaacggtcgcgcccaggtagtcgccacggcgctctttgcgcagcacgtcggagtagatacggccggtggtgaagttattgcggcgcgtcatcttggtgcggataaaacgctcatagtggcccaggtccagatcggtttctgcgccgtcttcagtaacgaacacttccccatgctggattgggctcatggtgcccggatcgacgttgatatacggatccagtttcatgatggtcacgttgagaccacgggcttcaagaatggctgccagggaggctgcggcaatgcctttacccagagaggatacgaccccgccggtcacaaaaatatagttcgttgtcatgctgaacctgagaagttagggtaaaacgatggaataaccaggacgggaaagtagtatacccgaacatgcgtgacgccacaaactttcattcttcccctccccttcgttcttcaagttgcacctgtgttgcgactcgaacaactcgaagaggcaggctacatggtgtttcaacgacataacggaaagagaaaatagacgcttttggcgaaatgtttttgacgtaaatcaagcgcttgttatttataaaatcacacaaatcgcgcctgatcacgaaaatccgttagagatcagtttcctggcgttttacttcctgccacacttcttccatggtatcgaggtcgacgccggtcatttccaggcctcgggcggcgacaatacgctcgacctcgcggaagcgacgctcaaatttgaggtttgctttctgcagcgccacctcggctttgacgcccaaatgacgggataagttcaccgtggcaaacagcagatcgcccacttcctcttccagttttgcttcatccaccaccgcctgctgcgcttcatgcatcacttcatcaatttcttcatgcactttgtcgagcaccgggcccagcgaggtccagtcgaaacccactgccgagcagcggcgctggattttatgcgcgcgcatcagcgccggcaggctatggggaatatcgtccagtgccgaatgctgggctttttccgcccgctccgcgcttttgatttgctcccagcgggccaggacttccgtgctattgcccgccgatgcctcgccgaagatatgcgggtggcgacgctccagcttgtcgctgatggcggcgcagatatcgtcaaagttaaagcgtccctcttcctgcgccatttgcgcatagaacaccacctggaacagcagatcgcccagttcaccgcgcagatcgtcaaaatcttcccgctggatagcatcgaggacctcgtaggtctcctcaagggtgtaaggggcgatagtggcaaaggtctgctctttatcccatgggcagccgttttccgggtcgcgcaggcggcgcatgatgccgagcaagcggtcaatttgagtcatgtgacaatcctggaaatttaaaaaatagtcggccggataaggcgtttagaccttatccgacgttgcgaaattgccggatggcggcttcgccttatccggcctacagacgaattaaccgccgtgcagacggcgcgcgtcgatcacatccggcacctggttgagcttaccgagcacccggcccagcacctgcaggttgtaaatctcgatggtcatatcgatggttgccagctgctgacgggtatcgctgcggctggcgacgcccagcacgttcaccttctcattggcgaggatggtagtgatatcgcgcagtaaaccgctgcgatcgttcgcctccaccctgaccaccagcgagtagcccgccgagtagctttcgccccataccgcatcgacgatgcgctccggggcatgcgactgcagttctgccagctgatcgcagtccgcgcgatgcacggagatcccgcgcccctgggtgataaagccgacgatctcgtcgcccgggattggctggcagcagcgggcaatatggtgcatcaggttgcctaccccttccaccactacccggccattgtccttggtgcgattttgcggcgtgtaggttttctgctgcagttgcttcagcgcggccgcatcctgctcggcggcgctaggtttattgaactgcgcctgcaggaagttgaccatctggttgagacggatatcgccaccgccgatggcggccagcagttcatcgagctcgttgaagttatagcgcggcagcaggtgcttttccgcatccttcaggctgatgcccaaatgctccagctcgtcgtcgaggatctgccgaccggcgagaatgttcttgtcgcgatcctgcttacggaaccaggcgtggatcttcgaacgtccgcggctggtggtcacatagccgaggttagggttcagccagtcacggctcgggttcggctgcttctgggtaataatttcgatctgatcgcccatctgcagctggtaggtgaatggcacgatgcggccgccaattttggcgccgatgcagcgatggccgacatcgctgtgaatatgataggcaaagtcgagcggcgtcgaccccgcaggcaggtccaccacgtcgcctttcggcgtaaagacatacacccggtcgtcgaagacctggctgcgcacttcgtcgagcatctcgccggagtcggccatctcttcctgccaggcaatcagcttacgcagccaggcgatacggtcttcatagccgcggccgccgctggtgccggctcccgcgccctctttgtacttccagtgcgcggccacgcccagctcggcatcttcatgcatctgccgggtgcggatctgaatctccaccgtcttgccgctcggccccagcaccacggtatggatagactggtaaccgttgggtttcgggttggccacgtagtcgtcgaattcatccggcagatggcggtagtgagtatggacgatccccagcgcggcatagcaatcctgcaaacgctcagccacaatacgcaccgcgcgaacgtcaaacagctcgtcgaaagcgaggtgttttttctgcattttgcgccagatactgtagatatgcttcggccggccatagacttccgccttgacgccttcggctttcatctctgagcgcaggtggccgacaaactcttcgatgtaatgctcgcggtcgatacggcgctcgtggagcagtttggcaatgcgcttgtattccgccgggtgcagatagcggaagcagtaatcttccagctcccacttcagctggccgatacctaagcggttcgccaggggagcatagatattggtgcactctttcgccgcaagaacgcgctcatcttccggcgcgtctttgacctcgcgcagatgcgcgatacgctcagcaagtttgatgaccacgcagcggaaatcgtcaaccatcgccagcagcatacggcgaatgttatccacctgctcggaagagactgagtcggtatgggtagccttcagctggcggatagcggccatgtcccgcaccccgtgaatcagggtcacgaccgatttacctacgctctcctgcatcacctcttcgctgacaacttcgccgtcggccagcgggaacagcagcgccgcgcgcagcgtatcgatgtccatacttagggtggagaggatctccaccatttcgacgccccgccacagcagcaggtccgcctgcgggtgtccttgcgttttttcgcgacaataatcccaggtttcggctaagcgctcacacgactgctggctggaaattcccagactcgcgatccatttcttcgggtcaaattcaccagctttattaagatgtgcacttcttaccgcaaccattgtcctctccttaagggaccggcctgccgaagtcggcaagcctcaactttctacatgtcatcctgcaggtcgcgtcagcattcatggccagggtggctcttctgcgacgttgtgaatgaccttatgtaagcctgcgctcaaacaacaccattgattccagatggccggtatgcgggaacatatccagcatcgccaggcgttgaatctgatatccagcctgcaacagggtttcgctgtctcgcgccagcgtcgccgggttgcaggaaacatacaccacccgccgcggtgccagttttattatatgcggcatcacgcccggcgcgccggcgcgggccgggtccagcagcactttatcaaagccgtgcttcgcccaggcctgacgggtgacgtcttcttccagattttcatggaagaaagtgacatttgataaaccattgcgggcggcgttttcccgccccttctccaccagcgccggcaccccttccacgcccaccacatgggcggcgcgtgtcgccagcggcagggtaaagttgcccatcccgcagaacagatccagcacccggtcctctggccgcagatccagccactccagtgcggtacgcaccatctgctgatttacgccgtcgttgacctggataaaatcccgcgggctgaacactaagcgtagtccgtctgaggtataccatggcgcttcgccatgaatttgctccagtatctcgctttgtggcgcgaggtacagggaaagaccgtgagtttgcgaaaagcgttccagtttttccctgtctgtcgccggcagggctgcggtatggcgcagcaccatcagcgggccattgtccgcctgcaccagctcgacgtggccgagatggcgtaatgcgctcagcgcgcttaagcactcgcgcacagcgggcagcaatgcctcaagttggggcaccaaaacagggcactgcaccacatcgacgatcgctttggcgttgacctggcgaaaacccatctgcaattgttgggtcttcggctgataattcaagctcaagcgtgcgcgacggcggtagccccacggcgcgccggcgatgacgtcatctacctcgcgcttcatcagtcgccccagcgcggcgcgtttactttgctgctgaagcggaacgctggcatgttgttgttggcatccgccgcagacgccaaaatgggggcagcgcggcgcctggcgctgcgggctgtcggtcagtcggcgtttcacctcggcgcgggcgtactgttttttatcttccaccagcaccacctcggcctgctcgtggggcagcacgccgctcacgaacagcgccttcccctggtggcgggcaacaccctgaccaaagggatcgaggtcgttgactgtaacggttatgatctggcgcgtcgtcacacgccgttttgcagagtagaattgcgccatcgtagagagttgtctcaatcaaataaaacgagctcgttcagagcggcagcgccgcgaggcgcagcgacgctgcacagaacgatgatgtctatattctcccataatggaaccgcatgaccaactacagcctgcgtgctcgcatgatgattctgattctggcgccaaccgtcctgataggactgttgctcagtattttctttgtcgctcatcgttataacgacctgcaacgccagctggaggacgctggcgccagtattatcgaaccgctggcggtctccagcgaatatggcatgaacttgcaaaaccgcgaatccatcggccagctgatcagcgttctgcatcgtcgccactcggagatcgtgcgggccatctcggtgtacgattcgcataaccgcttatttgtcacctccaattaccagctcaatcccagcgaactgcagatcccgaaaggcgaggcattcccccgtcacctcagcgtcatccgcgatggcgacatgatgatcctgcgcacgcctattgtctcggaaagctattctccggatgaatcacccgaatctgacgctaaaatgccgggcaatatgctgggctacgtcgccctggagctggatctaaaatcggttcgcctccagcagtacaaagagatttttatctccagcgtaatgatgctgttctgtatcggcatcgcgttaatcttcggctggaggctgatgcgcgacgtcaccgggccaatccgcaatatggttaacactgtcgaccgcatccgccgcggacagctggacagccgggtcgaaggctttatgctcggcgaactggatatgctgaaaaacggcattaactcgatggccatgtcgctggcggcataccacgaagagatgcaacacaacgtcgaccaggcgacctccgatctacgggaaacgcttgaacagatggagatccagaacgtcgagctggacctggcgaaaaagcgcgcccaggaggcggcgcgcattaagtctgagttcctggccaatatgtctcacgagctgcgcaccccgctcaatggggtgatcggctttacccgcctgacgctgaaaaccgatctcaacgctacgcagcgcgaccacctgaccaccatcgaacgttcggccaacaatctgctggcgatcatcaatgacgtgctcgacttttccaagctggaagccgggaagctcatcctggagagtattccgttcctgctgcgcacttcgcttgatgaagtggtcaccctgctggcgcattccgcgcacgataaagggctggagctgacgctgaatattaagaacaatgtaccggataacgtcattggcgatccgctgcgtctgcagcagattgtgaccaacctcgtgggcaacgccatcaaatttaccgagcacggcaatatcgacgtactggtggagcagcgggccatcagtaattcccgggtacagatcgaaattcagatccacgataccggcatcggcatccccgagcgcgaccagtcccggctattccaggccttccgtcaggccgatgccagtatttcacgccgccacggcggcaccgggctcgggctggtgatcactcagcgtctggtcaaagagatgggcggggatatttcgttccacagccagccgaaccgcggctccaccttctggttccatatcagcctcgatctcaacccgaacgccattccggatacgctgaacaccgacgggcttgtcggcaaacgtctggcctatgtggaagccaacgcgacggcggcgcagtgtaccctggagatgctggccgctacgccgctggaggttatctatagccctaccttctcctcgctggcggaagcgcagtatgacattctgctggtcggtatcccggtttcaatgcgcgatttgtcgccgcatcgggaaaaattagccaaagcctgcgcgatgtccgataacgtactgctggccctgccgtgccatgcccaggtcagcgccgaagccctgaagcgcgacggcgttgccgcctgcctgttaaagccgctcaccaccacccgtctgctaccggcgctggtggctaccagccacgcgcttgcctccgcgccgctgatgcagatcgacagtcataagttgccaatgacggtaatggccgtcgacgacaacccggctaacctgaagctgattggcgccctgctggatgatcttgtgcagcaggtgatcctctgcgacagcggccagcaggcggtggacaaggccaagcagctgcagatggatctgatcctgatggatattcagatgccggatatggacggcatccgcgcctgcgagcttatccatcacctgtcccatcatcagcaaaccccggttattgcggtcaccgcgcacgccctggagggccagcgtgagaaattactgagcgccggcatgaacgactatctggcgaagccaatcgaagaagagaaactgcacgcactgctgctgcgctatcagcccggcctgcacagcgtcgttccggcgtcgctaccgcccgcagagccgatcgtcgatcataatcaaacgctcgactggcagctggcgctgcgccaggcggccatgaagccggacctggcgcgggagatgctgcaaatgctgatcgcctttatgccggaggtgcgtaacaaagttgaggagcagctggtgggcgagcagccggaagggctggtggatctgatccataaactgcacggcagctgcagctatagcggcgtgccgcggctgaaaaagctgtgccataccctggaaagtcagctacgggcaggcaccgccgccgaggatctggagccggagctgcttgagctgttagatgagatggataatgtggcccgcgaagcgtgccggatgggggtgtgaaccccggatagcggcgctacgcgcctcatccgggctacgtcctacggtccggtattcggttggtagccccggtaagcgtaagcgccaccggggatggttcccggatcgcggtgctacgcaccttatccgggctacaaataccactgcgccagccgggttaccgcctgtcgcccatctgcaaaaccgcggctacgttacgcgccgtcattcgcaggttggcggcggcattggccaacgcttcatcaagggtacagatggtatacaacacgctgaataccgcatccagcccgtgctgatgcacgacgccaacatcggcggtaagactgccggcaatcccgatcaccgggacgttaaaacgcttcgccaccctcgccacccccaccggcactttgccgtggatcgtctggctatcgatacgcccttcgccggtgatcactaaatcggcatccgccacccgctcagccagctgtagcgcatcggtgacaatctcaatgcccggacgcaactgagcaccacagaacgcatacagcgccgcacccatgccgcccgccgcgccgccgccctcaaggctcagcacgtcgatatctaaatcgcgggcgataatccgggcatagtgccgtaggccgctatcgagccggtcgatcatctgcgccgtcgcccctttttgcgggccgaacaccgcgctggcgccctgcgggccggtcaacgggttggtgacgtcgcaggcaacgtcaatccggcaatctgccagccgcgaatcgagttcgctgagatcgattcgcgccagcgtctccagcgcgccgcccccggaggcaatttgctggccctcggcggtcagcagtttcgcccccagcgcctgcgccatcccggcgccgccgtcattggtcgcactgccgccaataccaataatgatctgtcttaccccggcgtccagcgcatggcggataagctccccggtaccccaggaagtggtcagcagcgggttacgctgcgccggcgggacgctctccaggccgctggccgccgccatttcgataaaggcgcactggcgatcgccggacagcccgtaaaatgcctcaaccggctcgcccagcggcccggtgaccgtcagcggaaccagaagcccgccggtcgccgccaccatggcttccaccgtcccttccccaccatcggcaaccggcagcttgacatactcggcgtcaggataaatctcgcgaaagccttgctctatcgcactggccacttccagcgcgctcaggctctccttccaggaatccggtgcgatcactattttcatctgctgtccttactctgagccaacccctggcgctgtcgcgcaatgccggcccccgcagaggccggcggacttttagcgcaccatgcatggacgcttgttgtcaaaggtccagcccgggatcagatactgcatcgccatcgcatcgtcgcgggcgccaagaccatgtttcttatatagctcatttgcctgcatcacgcggtccatatccagctcaacccccaggcccggggtactcggtacctgcaccatgccgcctttgatttcaaaaggttgtttggtcagacgctggttgccctcctgccagatccagtgggtatcgatagcggtgatcttgcccggcgccgctgccgcgacgtgggtgaacatcgccagcgacacgtcgaagtgattattagagtgcgaaccccaggtcagaccgaactcatggcacatctgcgctacgcgcaccgacccctgcatggtccagaagtgcgggtccgccagcgggatatccaccgattgtagcgacagcgtatggcccatctgccgccagtcggtggcgatcatattggtggcggtcggcaggcccgtcgcgcggcggaactcggccatcacttcgcggccggagaagccctgttcggcgccgcacggatcttccgcataggccagcacgcccttcagctgtttaccaatctgaatggcctcctcaagcagccaggcgccattcgggtcgagagtgacgcgagcattcgggaagcgcttcgccagggcgctgatcgcttcggcttcttcaaaaccggccagcacgccgcccttcagcttaaagtcgttgaaaccatatttttcatacgccgcttccgccaggcggaccaccgcatccggcgtcatcgcctcttcatggcgcaggcgataccactcgcactgctcatccggctggctctgataggccagcggcgtcgcatggcgattaccgacaaagaacagatagcccagcatttcgacttcgctgcgctgctggccatcgcctagcagcgaggcgacgttgaccccaaggtgctggcccagcagatccagcagtgccgcttcgatgccggtcaccacgtgaatggtggtgcgcaggtcaaaggtctgcaggccgcggcccccggcgtcgcggtcggcaaactgattgcgcaccgcgcccagcacgtttttatactcgcccagcgttttgcccaccaccagcggaatggcatcctccagggtctggcgaatcttttcaccgcccgggatttcaccgacgccggtatggccggcgttatctttgataattacgatattgcgggtgaagtacggggcgtgggcgccgctcaggttcatcagcatgctgtcatggccggcaaccgggatcacctgcatggtggtgacaacgggcgttgaagagaaagtcgtcatagcatcatcctttttaattagtggcggccgaaaacgggacgtttgcggtcgaatgtccagccggggatcaggtactgcatcgggcctgcgtcgttgcgcgcgccgcccggcagcgctttataggcctcatgggctctgcgcacctgctcccagtcaagttccacgccgagtcccggcgcgtctggcacggcaatgctgccgttaataatctgcagcggatttttggtcaggcgcgcgtcgccctcctgccagatccagtgggtatcgatggcggtggggttgcccggcgcggcggcgccgacgtgggtaaacatcgccagggaaatatcaaagtggttgttggaatggcagccccaggtgagcccccagtcgtcgcacagctgcgccacccgcaccgcgccggagagcgtccagaagtgcgggtccgccagcgggatatcgacggcgttgagcatcaccgcatggcccatttcgcgccagttagtggctatcatattggtggcgaccggcagcccggtggcgcggcggaactcggccatcacctcccggccggagaaaccctgctcggcgccgcacggatcttcggcgtaggtcagaacatcctgcagccctttacacagcgcgatggcctcatccagcagccaggcgccgttagggtcgacggtgatgcgcgcatccgggaaacgctttttcagcgcccgcgcggtgtcaatctcctgctcgccgggcagcacgccgcctttgagcttaaagtctttgaaaccgtagcgatcctgggcggcttccgccagacgcattaccgcctcgctgctcaacgcctgctggtggcgcaggcggtaccattcgtgatcgcccggcgtatggtccagataaccaaggtcggttttctgccgatcgccgatatagaacaggtagcccagcacggtgacggcatcacgctgcttacccgggcccagcagctcgcagaccggcacattaagcacctggccgagcaggtccagcagcgccgcttccagcgccgccaccgcgttaaccttcagttcgaaggtccacgcccctttgccgaaggtgtcgaaatccgccgcctgattgcctttgtgcacctgctgcaccacgcgattgagtcgggcgacctcctggcccaccacctgcgggatcgccgccagcagcgtctggtagatgacctctccgccgggcgcttcgccgacgccggtatggccggcgttatcggttaacaccacgatattgcgggtaaaccaggcgttatgcgctccgccgatgttcagcagcatgctgtcgtgcccggccaccggaatgaccttcatctctgtgataatcgggctggattgagtagtcatgattaacgtcccgctacaggtttcagttcgatacgtttgatatcgcccaccagcaccagatagctcagcaccgccaccagggcatggataccgacgtagatcagcgcgccgttgaacgagccggtggtgccgacgatatagccgatggcgatcggggtgacgatgccggagatattgccgaacatattgaacagaccgccggagagaccactaatctctttcggcgcggtatccgccatcaccgcccagccgagggcgccgatccctttgccgaagaaggccattgccataaagccgatcaccatccactccacgttgacatagttacacatcagcatggtcatggagagcagcatccccagcacaatcggcgttttgcgcgcaatgttcagcgagccggtgcggcgcattaaccagtcggagatcaccccgcccagcaccccgccgacaaagccgcacaccgccggaatcgaggcgacaaagccggctttgaggatcgacatgccgcgcgcctgcaccagataaaccgggaaccaggtgataaagaagtaggttaaggcgttgatgcagtactgaccgatatagatgccgatcatcatccgcgagccgatcagttgcttgatctgccccattttgacgctaaacggcactttctgcgcgctgctcttctgatccatgttgatcagcgccccgccttcggcgatatagtccagctctttctggttcacgcccgggtggttgttcggatcgtggatcactttcagccacacaaagctgatcacaatccccagcccgcccataaagaagaacacatgcgaccaacccacctcatgcgtcagccagcccatgatcggcgcgaaaataacggtggcaaagtactgggcggagttaaaaatcgataccgctgtccccctctcctgcgccgggaaccaggcggcgacgatccggctgttgccggggaatgacggcgactcggcaaggccgacgaggaagcgcagggtaaacagcgcaacgataatgccaaagccgctgaagatatcgacgaagccctgcagcagggtaaacatcgaccagatgaagatcgaccagaaatagacgcgcttcgagccgaagcggtcgagcagccagccgcccgggatctggccgatgacataagcccatgagaaggcggagaacacataccccatccccaccggatcaaggccgatgtccctggccatttccgaaccggcgatcgacagcgtcgcccggtcgccatagttaaaagaggtgacgataaacagcatcaccactatccagtagcgggcgttggtgcgcttttcagccgccgtcgccgcctgacttaatgaactcattgttgtactcctgaatcatagcgtttagctacgttcattctgaacagcacaacctgtagggtaatcagaatgacgtggtcgtgttttgatagttgtcgttatatctggcactgcatttatcactggctggagcagtatatgaagaggcacaccgcggctcaccgtgcatccacacagcttttacgccgctattgcaggtggtttgtggcgaatgcctgaaagaatggggggaagttcacggaaatgaaaagccagcgccgctggcgccgcatagcgcagcaaaaagggccggagtgtgaaatacctcacttgacccggtgaaactggctggcttaagccatgatattgttaaggatattgtggcgtttgcctaaaggcgtggcgcctggaaagcgctactattttgacgtccgcgtatctggccgcgacgtattgaaagagcgccctctgcgtagggagagggcagcgcttttatgcgagcagggtggcccactgctcaacccacggattggagacgctctccggctccgggtcttcgctggcgtcaatcttcagcatctcgccgatgcgcttcgcgccctgctcctgcagcagctgatcgaacttcaggccgccgccgcaaaagttggcataggtgctgtcgccgagcgcgataatgccgtaccgcaggtgaggctgatacatatctttgatgccctcatacagcgggacgatgctgtccggcagatcgccctgcccggtggtggaggtgaccaccagcacatacttacccgtgtaggattcccagtcgttgacctgcggatcctcatacacggtagccttgtgtcccagtccgctgaggatcgcttccgcttcttccgcgaccagcagcgagttgccgtacatggtgccgacaaaaattccgacttccgccatgctattatctccctggattgaccttattctcttcatcctgaccgctgtcgtcggcaaactcaaccctttcatttagcgggagaagcccgcgccagccaaactgcgacagcgcgcgcatccagacgtcgtcaaaaccggcgcgcagggtcagcggctcgccggtaaaaggatgggttaacgacagctcgctggcgtgcagcatcaagcggtgacagccgaaatgttccgcggcactgcggttttgccgcagatcgccgtgcttgctgtcgccgaggatcggatgacggaggtgggccagatgacggcgcagctggtgcttgcggccggttttcggctccagttccaccagcccatagcgcgaggtgggatagcgcccagtcgccactggcatctccactgtcgccagaccgcggtagtgggttaccgctggctgcggccctttatcttcgcgggcgaacttatcggcgattctatccagctcctccaccagcgggtaatccagcagcgcctcttccatcagccagccgcggacgatcgcatggtagcgcttccggatctggtgctgctcgaactgttgcgccagcagccggcccgcctcgctcgacaatcccatcagcagcacgccggaggtgggccggtcgagacgatgagcggtaaaaacgtgctgaccgatctggtcgcgcacggtctgcatcaccacaactttctcgtcgcgatcgagccagctgcgatgcaccagccagcccgagggtttgttgaccgccaccagccagtcgtcctggtagataatctccagcatcaggcctgctcaccggcaaacagcgcgtctaacagcagaagttccgccagcatggattcgcggaccgggtgggcctgatccagagccatctcgtaataaggcgcaacggcaaaattttgcggcagcggctggccgctctccagcagctggtgcatacgcgggatcaggacccactgcagccactccagcggctccagggtatccaggcaaaacggcttatcgctggcgaaggcgctgctgtccggcgccgtctcctgccagtgctccgtttcgcgcagcagggcttcaatggcgcgcaggcgatcgcgcacgctatcgtgaagagtcatggggaaacctcgatgagttaaaaaccgggcgcaggatagcaaatccgcaggagaaataaaaaaagggagcactgtataaacagtgctcccggttcgttttgcagcagtcccgctacattggtgctccctgctcgtccttgaaaacttttcctgaggtctcctgaccatgttcatccataaacacgtgcatcctgctttcacaccaccccgatgcgaaatgacttatccataagtttgtcccgatcttcctgatccaccgttcatcctgagcggctctcgttctccatcctggaggtgtccattacgcgatcctgcgttatccttgcttcatcctgaagcctgtccctgcaacgccgtcctggcgggtcctgcagaagcgccatcatcctgatgttcgcttcatttcgcgacgtcctgtcgacagacataggatcactgattctgccccttcttacaacccttcttgagacaatctcttaagattagtccccactcaaaaggacgaaaaaattaagatctgatttaataccaacaacttatataaaaaagtatggattaaatttaccttaaatgatgacgatctcttacaggttttgtaagagatctctcacaaacgatctggcagactggattacagaactggctcaaggtggttgaggaaacccgcaagtgagggagaaagcgtaatgcgtttggcggtgccgagggtctctttgactacctcgccgctgagattacagacggatatcacatccagttcactctcgagggtggcgatgaacagcgtcggcgacagcttcaaccgcttctgcaccaccaggtgcccgattaaattttcctgcacccgctggaaatcctcttcactccaggtctgcagcagcgtcaaggtttcgccggcaaaccggccggacatatcgccggcaaactgagtggtataataagaatgaagcggctgttgtaccacaatgtcgagggcgcgttcaaccgcgctgatattttgcgccagcgaaaacggctgcggctgccagaaaacggcctcgccctgggtgtcgacaacgcaaggcgacgggacgccgtaaagctcttcactgcgcggcaggctgtggcgctgctgctgccagacggcgcaatatcgttgggtaaaagcgcgtagcgcttctgctgtctgatggtccaccggtttctctcttcacgttagacaggatacactggagcaatagtgtacccgctttactatggtgaaacatgtcttcttacgataatcatcaggcgctggccggcctgacgctcggtaaatcaaccgattaccgcgatacctatgacgcctcgctgctgcagggcgtgccgcgcagtttaaaccgcgacccgctgggcctgcatgccgataatctgccgtttcacggcgccgatatctggacgctgtacgaactctcctggctgaacggcaaaggtctgccgcaggtagctgtcggccacgtcgagctgcccgataccagcctcaatctggtggagtcgaaaagctttaagctctatctcaacagctttaaccagacccgtttcgctagctggcaggacgttgcagagacgctgactcgcgatctcagcgcctgcgcgcaggggaaggtgaaggtatcgctctaccgcctggatgaactggaaggccagccgattgcccgcctgcacggcacctgcatcgacgatcaggatatcgagatcgataactatcagttcagcgccgattacctgcagggcgccgccagcggcaaaatcgtggaggagacgctggtcagccacctgctgaagtctaattgccttatcactcatcagccggactggggctcggtgcagatccagtatcggggggcgaaaatcgaccgcgagcagctcctgcgctatctggtttcgttccgccaccataacgaattccatgagcagtgcgtcgaacgtatctttaacgatattctccgtttctgccagccggaatcgctttccgtttacgcccgctatacgcgacgcggcggtctggatatcaacccctggcgcagcaatggcgacttttcccccgccaccggccgcctcgcccgtcaataataaacaatttcacaatttgcgtgcgtttaggcgcgcgcaaggttgtggaaacgccgttcgcagggctattgtaatcacaggaagaccataagcgtcctgtaaggagttcacttgattacacatgttagcccgcttggttcaatggatatgctgtcgcagctggaagtggatatgcttaagcgcaccgccagcagcgacctgtaccaactctttcgcaactgctcgcttgctgtgctcaattcggggagcctgaccgataacagcaaggagctcctgtcccgtttcgaaaatttcgagattaacgtgctgcggcgcgaacgcggcgtgaagctggaactgatcaacccgccggaagacgccttcgttgacgggcggattatccgctccctgcaggccaacctgttcgccgtgctgcgcgatatcctgttcgtttacggccagatccacaataccgttcgcttcccgaacctcgatctcgaaagttcggttcatatcactaacctggtgttctcgatcctgcgcaacgcccgcgcgctgcacgtcggcgaggcgccgaacatgatcgtctgctggggcggccactccatcaacgaaaacgaatatctctacgcccgccgcgtcggtacgcagctgggcctgcgggaactgaatatctgcaccggctgcgggcctggcgcaatggaggcgccgatgaaaggcgccgccgtcggccatgcgcagcagcgctacaaagacagccgctttatcggcatgaccgaaccatccattatcgctgcggaaccaccgaacccgctggtcaatgaactgatcatcatgccggatatcgaaaagcgtctggaggccttcgtacgtatcgcccacgggatcattattttcccgggcggcgtcggcactgccgaagagctgctctacctgctgggtattctgatgcaccccgacaacaaagcgcaggtgctgccgctgatcctcaccgggccgaaggagagcgccgactacttccgcgtactggacgagtttatcacccataccctgggcgaatcggcccgtcgccactaccggatcatcattgacgaccccgcggaagtggcgcggcagatgaaaaaagcgatgccgctggtgaaagagagccgtcgcgagaccgatgacgcctatagctttaactggtcgattcgcatctcgccggacctgcagatgccgtttgatccgacccacgagaacatggccaacctcaaactctccccggatcagccggtggaagtgctggccgccgacctgcgtcgtgccttctccgggattgtcgcggggaacgtcaaagaggtgggcatccaggccattgagcagtacggtccttacaaactgcacggcgatccggagatgatgcgccgtatggacgatctgctgcagggcttcgtcgcccagcaccgcatgaagcttccgggcggcaccgcctatattccttgctacgaaatcatcgcctgatttcccactctcccgccggggcatcgcctgacgcctgcccccggcgggctctcttcctctgacttccagaacgcgctaaaaacctttctgttactaatcaatcacctgaattatttctacatagccaaacgtttgcgttggtaaaaactgcgacaattatcactgcaaaaaatggttttaagcgcaaaaacgtcgactagttctcttttttacagtaaatccctcgttattacgccgctccgcttttatctcatatgctgcaaatggtagccttcgcgccacaaatcgctggctgatcaccagaaacaggctgttggactaaaaatacgcacattgaaagtggattattgcatttgagatcgcgatcactgatgcataaaccatataaatgtatctttccggcccaattattacggagaaaatttctaaaaaaaccgtaattaaacgaatttcatgttacgcaattgtatttattcattagattttgttgattcctccaggagatacagatggaaaccactcaaaccagcaccatcgtttcgggcgaaacccgcagcggatggcgtaaaaccgacaccatgtggatgctgggcctgtacggtacagcgattggcgcgggcgtcttgttcctgccgatcaacgccggcgttggcggcatgatccccctgatcatcatggcgattctggccttcccgatgactttcttcgcccaccgcggcatgacccgcttcgtgctctccgggaaaaacccgggcgaagacatcaccgaagtagtggaagaacacttcggcgtaggcgcaggtaagctgattaccctgctttatttcttcgctatctacccgatcctgctggtttacagcgtggcgatcactaacaccgtcgaaaccttcatggcgcatcagctgcatatgacgccgccgccgcgcgccattctgtcgctgatcctgattgtcggcatgatgaccattgtgcgtttcggcgagcagatgatcgttaaggcaatgagtgtgctggtgttcccattcgttatcgcgctgatggtgctggctctgtatctgatcccgcagtggaacggcgcggcgctagagacgctctccctgagcggcgcttccgttaccggcaacggcctgctgatgaccctgtggctggcgatcccggtgatggtcttctccttcaaccactcgccgatcatctcttccttcgcggtagccaaacgtgaagagtacggcgaaggcgctgagaagaaatgctccagtatcctcgcgcgcgcccacatcatgatggtgctgaccgtgatgttcttcgtcttcagctgcgttctgagcctctctccggcagacctggcggcggcgaaagagcagaacatctcgattctgtcttacctggcgaaccactttaacgcgccaatcattgcctggatggcaccgatcatcgcgatgatcgccatcaccaaatccttccttggccactatctgggcgctcgcgaaggctttaacggcatggtgattaaatccctgcgcagtaaaggcaaatcgattgaaatcaacaaactgaacaagctgaccgcgctgttcatgctgatcaccacctggattgtggcaaccctgaacccgagcatcctcggtatgatcgagacccttggcggcccgattatcgcgatgatcctgttcctgatgccgatgtacgcgattcagaaagtcccggcgatgcgtaaatacagcggccatatcagcaacgtcttcgtggtgattatgggcctgattgccatctccgcgatcttctactctctgttcagctaattcattcaacgcctcccccgcgccgctttacggcggcgcgctttccgacagcacgggaatacatatgatcagcgtattcgatatctttaaaatcggcattggcccttccagctcccataccgttggaccgatgaaagcgggcaaacaattcactgacgacctgatcgcgcgcggcctgctggccgaggtgagcaaagtcgtcgtcgacgtctacggctccctctccctgaccggtaaaggccaccataccgatatcgcgattatcatgggactcgccggcaacctgccggacaccgttgacatcgacgccattccgggctttattcaggatgttaatacccatggccgcctgatgctggccaacggtaagcacgaagtggacttcccggtggatcagtgcatgaatttccatgccgacaacctgtcgctgcatgagaacggcatgcgtatcaccgccctggccggcgacaaggtgctctacagccagacgtattactctatcggcggcggctttatcgttgatgaggagcacttcggccagactaccgaggcgccggttgccgttccttacccttacaaaaacgccgccgacctgcagcgtcactgccgtgaaaccgggctgtcgctctccggcctgatgatgcagaacgaactggcgctgcacagcaaagaagcccttgagcaacacttcgccgcggtgtgggaagtgatgagcgccggtatcgagcgcggcatcaccaccgaaggcgtcctgccgggcaaactgcgcgtcccgcgccgcgccgccgcgctgcgccgtatgctggtgagccaggacaccaccaacagcgatccgatggcggtggtcgactggatcaatatgttcgccctggcggtgaacgaagagaacgccgccggcggccgggtggtgaccgcgccaaccaacggcgcctgcggtatcgtgccggcggtgctggcctactacgacaagtttatccgcaaggtgaacagcaactccctggcccgctatatgctggtcgccagcgcgattggttcgctgtataagatgaacgcctccatctccggcgccgaagtcggctgccagggtgaagtgggggtcgcctgctcaatggcggcggccggtctggcggaactgctgggcggcagcccgggtcaggtgtgcatcgcggcagagatcgctatggagcataacctcggcctgacctgcgacccggtcgccggccaggtgcaggtgccgtgcatcgaacgcaacgctatcgctgccgtgaaagcggtcaacgccgcgcgaatggcgctgcgccggaccagcgagccgcgcgtgtgtctcgataaagtgatcgagaccatgtacgaaaccggcaaagacatgaacgccaagtaccgggaaacctcccgcggtggtctggcgatgaagattgttgcctgcgattaacctgctggcccgccacgcatcggcgtgtcgggccatcgtcctgcataactctttttgttatatcaataaaattttagttatttaatggttataagcgctgtttgttaccttacgcaaaaccgctaaggagaacagacaatgtccaaccgattccgccccgcctggctgctggtcctcgccgccctctctacctccgcgctggccaaagcgccggaaaccgtcaacatcggctatcaaaaggcgaatatcttcgcgctgctgaagtaccgcggcacgctggatgagagcctgaaaaaacagggcattgccgtacgctgggtcgaattccccgccgggccgcaaatgctggaggggctgaacgtcggtagtatcgatctggccgcgaccggcgatgcgcctccggcctttgcccaggcggcgcaagccgatctggtctaccttgcccactcccccgctaacccgaaaacggaagcgattgtggtgcctgaacagtcggcaatccacagcgtggccgacctgaagggcaagcgcgtggggttgaacaaggggtctgacgtcaactacctgctggttgccgcactggaaaaagcgggcctcagctataaagacatcaccccggtctatctgccgccggcggacgcccgcgccgctttccagcgcggggcgattgatgcgtgggtgatctgggatccgttcctcgcagaagtggaaaccaacgcgaaagcccgacagatccgcaatgccgaggggctggtgccgcactacaccttctatctcgccagccgcaagtttgcagatacctacccggagacagcaaagcaggtggtggatgagctgggtaaactcagcgcgtgggcgaacagccatcaggacgaggccgccgggctgctgtcgacctcaaccggactggataaagccatctggctgaagaccctggcccgcctgccctacggtgccgaacgcatgaccccggcggtgtataacgaacagcaggcgctggcggatacctttacgcgcatcggcctgctgccggtgaaagtcgacgtgcgcagcgccacctggtcgctggataaaccttgattttcctgacgacgggaagctctgcgcctcccgtcgccgacaggcttaccccgccgttttctcaccattgcctatctgccagataaaggtgggcgcttcaccgttcaccagccagttaccgatattacgtgccttataaatcaccggattatgcgaggcaaccgtccgcgcattgcgccagtggcgatccagcgcaaggcgagttcgcgtatccgacgccccgagggcattaaacagctccgtcgccgcccgcgggatccagtcgctggcgatcacctgcgcctgcgccgcttccacttccgccagctggttacgccgggcaatcaatgcttcgtcgtcgctgacgtgcgccacataggcctgctgcagcgattccgcggcctgcaggaccgcggcccgggtcgcccatgcccagctgctgatctgcccaacgacctgcagaacctgggcgtcatcgcgcggcacggcggcgttgccgtggctgtacatccgggagcgatgtttgacgccctgcgcggcatcccgctcaaccgccaggccaatgcccgcgagggtcgccagcagcacatgctggtagaaggcggtctgatagcgaaagcgctgggcaaaatcatagacatgttcggtttccacccgagcgccggtaaagcgggtggtcccgctgccggtcaaccgctggccaaagccatcccagtcatcttcccgcaccacgccggtctgctgggtgctgaccagggctatcacatcgctggcggtatcactgcgccgggcaaacacatcgatccagtcggcgtacagcgcgccggtgctgtaaaacttctcgccgtcgagtcgccagccgccctctgccggcgtcactctggtgttcacctctcccagcttaaccgcgccgatctccgtccagccgctgcccaccagctcaccgtcgaggaagcgacgaaaccagcggtcgcgcccggcggaatccggctgattcagctgatcttccacaaaggcaaagtgcgcgcgcagggcctgcggcaggttagagtccgcttgcgccagctcgatcagcagcgcgctgagctgcggcagcgaagcgccccagccgcccttctcgcgcgggatacgcagcgtgccgaagcccgcttctttcagccagcggatcggctcatcgggcagaatgcgctgctgttcgcgctccgcagcgccctgggcgatacgggtgaatatcgggcggaaggcggccgccagcgcgtcataatcggtgccagtggagagcagggtcattgtcagttccttattcatgaagtgcgtcgatatcttctcgcgtcggttcatgacggaccgccagcaggaagaaaatgggaataatggcggcaagcgagaccacccagaacatctgcgtgccgagggaggcctgcagcagcggcagaataaacaacgccagcgcgctgccgatcccggagagtgcccggctgaaaccgaccccggtggcgcgaatggcagtaggataggagagcgccgggtagatcatcagctgcgcccccgggccaaacccttcggcgaacagccacagccccagcatcgcgatagccagcacgatacctgccgtcgcgtgcggttgccccaccagcgccagcacaatcagcgccacaaactgcagggcgaagccggctatcgccacatgacgcgaaggatatttccacgccagatgcataccgagcagcccaccggtaaaagcaaacagggcgttcagccccagcgatgccgaaatagtttcgaagacgccagccccgaggaactgggcaagaattgacggcaggaaaaaggcaatcgccgtgtactcgaaggagatacagatattcatcaccccggcgacgatagtccgctcgcggtagggtttttcgaacagcacgcggaagctcactttcggcgctggcgcgggcttcgccgccgggacctcatgggcatggatcccccaggagtcgcgtaaaatacgcactgcagaggtcagatcgccctggttggccgcccacagcggggattcattcataaatcgactgcggacggcaataatcagcagtgccggcacggcgccgaacagcagggaggcgcgccacagccagtcaagatgctcctgcggcagcaggaaatagaggccgaagataatgagaaagcagacggttgaggcggcgtaccacatcgggcaccacgccgcgaggcgagccgctttgttgcctttgccggcaaagcgggaaaactcggccagataggacatcgctaccggcaggtcgatgccaacgccgatgcccatcaggaagcgggcgccaatcaacacccagacgttcggcgccagcccggcggcgatagccgaaatcacgaaaaagaacatatcggccataaaaaccgaatagcgaccatatttatcggtcagccagccgccgataatattgccgacgatagtcccgaccataatggacgaagtcaccaggccggtcagcagcggtgagagctgaaattcacgtacaacgtcatcaataccgtaggagagcgtggttaagtcatatgcgtcgagaaaaacgccccccagcgcgaggaagacaatcatccgcgcatatttcgcttgttccttgccggaattaattagccgcgccacatccccgacgctactgaccggtaccgaagcgataccgggattatccactggtaatgtactcattttttcaccttattattttgtgcaggtcatcagcggttatagaccgcgcgcgacgagaataaaaacaacaaatcattctataaaaatcaatataatcaataagttaataaatatcaccagcacaaaaaggacgcgctttcacgcatcctcaagtgaaataaataacaacgaaaatagacgtcgtgcaggacgcttattccgcggacactggaactaatacgtcttttaccagcgggtcatcggtggtttttaaccacgtctggatccgcggatcagaaaaagcctgttttaatttgacgatattttcctgcgataaatacggtgtaccaatcactaattgcgaagcaaaggtgcgcggcgccggcgggaataatatgcctttctcacgcggcactttcccggcgtcaaattgcgagacatagccgatggcggcatccaccgaatttaacgcccgcggcatggtcagcagatccagctctttaaagacaaactgatgcgggttaccgacaatatttttcagcttcgccgtgcgcggctccaccgccgggtcgagcgagatcaacccaatgcgctggagcagccacagggcctgcccctgattggcgccatcgtcaggcacgacaatggtcgcgccgttgggcaacgcctgtaccgacgagtagcggtcggaatagatgccaaacgcccactggaacaccggcaccgtggtcgacagcgcaaagccgttagcgtccaccacctgtttaagccaccactgatgctgatagatcgtcccggcatactgaccttccgctaccgcgcggtcagcctggaccggatcctgcacccccaccgcctccagtttcagaccgtaatcgggcgcaatatgctgattaatatactcaatgatccgctgctcgccggccatcgccggctcgtagtgaatttttaacgtgctgccgaagaccacctgctggctttgggtatgtccccgccaccaccagaaggcgatggcgagcaggataatcaccgccagcgccgccagccagggccagcgccgcgctttacgtaactcaaattgctctgttgtcatacaaggttcccctgcgtgtggcgtaaacggttgaccagacggtcacccaaaaattgaatcaactggatcgtggcgatcagggcaacgatcgtcgcgatcatgatgtggttgtcgaagcgctgatagccgtacaccacggccaggtagccgatgccgccggcgccgatggtcccggcgatagccgaatactcgatcatcgagaccaggtttagcgtcaccgccgctaccagcgcgggcatggcttcactgagctgcgcgctggcaatgatttgccagcgcgacccgccgcagacgacccccaccgcggtgacctccgccggcaactcgcgcagcgcgttctccaccagacggccaaagaacgggacgccggcggcgatcatcggcactaccgcggcgggtatgccaatcgtggtgccggtcagccagtaagtgaacgggataatggcggccatcagcaccagaaacggcagcgaacgtcccatattgaccacccagttcagcagccggtacagcagtgcgtgcggaaataagccccgcggcgaggcattaaacaacaccacccccaccagccctcccagcgtgacgacaaacagcatcacaatggccaccatcagccaggtttcgccataggcggggagcagcagcgaagggatttcgccccagggggtatcctgactgatgactgtcggtttcataccgcctccctgagcaacggcgcgctgtcgaggatctccgccgttatgccgagctgcgccagcaggccctgcagtcgcgcgggcgacaggcgttcgccctgaaagcgcactccggcctgcaggcgaccggccagccgaccattaatcacctcgacgtgaccgccaaggagatcgatctgcagcgcccactgctggctcaggcggctgatccagtcggtggccaccggcacatcccagcggtagctcagacgcagcagcagatcgctgtgggtagctgccgccggcgtcagcggcaacagctgctggccgagcagagaatcgggacgcgccagcagatcttcgatccgcccgtactggacgatcgtcccgtcgcggatctccgccaccgcatccgccgccgtgcgcaccgcgtccatttcatgggtaatcaggacgatcgccagctggtactcatcacgcagccgcttgagcagagccagcaccgaggccgtggcctgaggatcgaggccggaggtggcttcatccgccagcagaacggacgggcgcagcgccagcgcgcgggcaatgccgatccgctggcgctggccgcctgagagctgggccggccaggcatccgctttgtggctcaggccgacgctctccagcagctcgccaacccgcgccttgatatcgcgctccaccacaccaagccacgccagcggcagggcgacattctcccaggcggtcctgcggctcaacagcgccgaagactggaaaacggtgccaatcgcccgccgttcccggcgcagcgcctcgccggacagcgctgacagatcctggccattgatacgaatgctgccgctgtccggttgctccagcaggctgatgcagcgcgccagggttgatttaccggcgccgctcggccccaccaccgcggtgatggagcgctcaggcacctgcagcgacagccctttcagcaccgcgctgagccggccatccgccgtgcggtaacttttatacaggtcatcaatagcgatcatgtcaccttctcctctaccgatgccgccgtgcgcgcatcgcggcggtagctggcgcccgggtgaggcgcggccagacgcgggccgccgccgaacagtttttcgcgcagggtcccctcgcggtactcttgcttaaagacgccgcgcttttgcagctcaggcaccagcagctcgacgacatcgcggaaggtttcgtgagtgacggcataggcgaggttaaagccatcgacgtccgtctcttcgacccaggactgcagctcgtccgccacggtttgcgcgctgccaaccaccagcggaccgaagccgccgatccccgcccaatcggccagggcctgcaccgtccactggcggttcggatcagcggtcgaaaaggcctccaccgccgactgaatggcgttggtgtgcagatacttcagcacctgatccggctgatactggccgaaatcgatccccgtccagccggagagcagcgccagcgcgccttcatagctgacgtactgcttatattcctgccacttcgcctgtgcctcgcggtcggtgtcgccgacaattaccgtctgcaggttgaagatcaggatgctgtgcggatcgcgccccgcctcagctgcccggcggcgaatatccgccaccgtcttcttcagcagcaccttcgacggcgctgcgacgaagacgcattcggcatggccggcggcgaactgtttgccgcggctggacgcccccgcctgatacagcaccggcgtgcgctgcggggatggctcgcagaggtggatccccggcacggaaaagaactgtccctgatggttaatgggatggattttccgcggatcgctgaagatcttccgctctctgtcgcgcagcaccgccccatcctcccagcttccctccagcaacttatagatcacctgcaaatactcatcggcatagtcatagcgggtgtcatggtcggtctgggtctgctggccgatattgcgcgccccgctctccagataggaggtgacgatattccagcccacccgccctttggtcagatgatcgagcgtcgacagacgacgagcgaaggggtaaggatgctcaaacgacagcgaggcggtcagcccgaagcccagatgctccgtcaccagcgccattggggtgatcagagccagcggatcgttgaccggaacctgcgtcgcctggcggatcgccgcatcgccgctgccgttcagcacgtcatagatccccagcacgtcggcgataaacagcccgtcgaacttgccgcgctccagcagccgcgccagatccacccagtactccagatctttatactgccaggagcgatcccggggatgcgcccacaggcccggcgactgatggccgacgcagttcatatcgaaagcgttaagacgaatttcacgttgtgatgacatagcaatctccatagcgcggcccgtcgccggggcgcacgcggcaaaatgaatcagggaaaagaaagagaggtattcagtacgcaggacatcgggagtcctgcgggatcccgagcgtgagtaacgcttgcgccgccacgtcagcggcatggtcggctacctgcggcaggcccatcagttcgccaaaacgcccgcgggcggccggaccggccaccagcaccggcagcgcctcaacgtgcggctcagccactgcccgggaacggctgtccacctccaggcccatgccgagggcatcggcgcgaatcaggccgcggcgggcgaggtcctgtaaaaatggctggctgtcggtcagggcgcggtgtgcgggtccggtggtcaggatcaggtgatcgacgctcagcgtctgcacgccgccgccgcgccgcgccagcgtcagacgcagcgtttcgccttcaccgcttatcgacagtagcctggccgcctgcacctgcagactgcccgtgcgctggcgcgcctccagcacctcggcgacctgcggcgccacgcggtagcggtggacatcccagtaatggcgcagatggcgcagaaaacgctggcgatcggcgacgctgagcgcctgccagatccgttgcccctgctgacgaaccgcatccagcaccacctgccagctcaggccctgctgcgccgcatacgcgacgtcgaggcggatctggcgcaggcgctggcgcaggctgccctgctgatagtcgccaggccaggttgcccctgcgccgctaaggttgccgcgcgacagcaggccatggcgcgaaaaggcgacgatactgccgcggtggcccagccggtccagcgtcgcgaccgtatcggccatggttaatccggtgcccatcaccgccacccgggcgtgtggggcgatggcatcgagcgcgcctggctgccacgggttggcaatcagcgccggatgatgacgccaggcttcggcctgtgccggcagcgaaggcggtggatgactgatcgccagcaccagcagatcggccttaagctgcaggccgccgtcggtggtcaccgtcccctgatgaaaagcgagcgcccgatcgcgcaggtggcgaagccgtccgccgctggacgccgcggcgtcggcaaaacgctgcgccacatagcgaccaaactggccgcgctgagggtagacggaaccgtccgggcgcagcgcctgcacatcgacggtaaaggcaggctgatggcggtaccaatgatcgaaggcgccctcttcgtcgccggccagctgcatgcgagcggccggaacgttaatccggtgcgtcggctccgcagtggagtaggccaccccggccccgggggactggcgcggctccagcagcgtcacgcgcaccccgttcggcgccaggcgcagcagctcaatcgccaccgccgcgccgctaaagccgccgccgataatcacgatatgcggttctgcactcatcgctgccctcctccggtatgctgtctcatggtcgcgctccgggccatcagctggcgctgacctggcgcaccgggcgcttatcgccgccgatggtttcgccaaacggaccggtgttcacgctacgcgccttcgacgaggccccgttttccagcggcaacagaggcatcaccagctcagcaaagcggtgcgcttcttccagatgtgggtaaccggagaagataaagttgctgatgccgagcgcctgatattcgcggatgcgttccgctacctgctgcggattacctaccagcgcggtacccgcgccgccgcgcaccagtccgacgccggcccacagattgggcgcaatgcgcagattatcgcgcgatccctgatgcagggcgctcatccgcgcctggccggccgagtccatgcgggcgaagatcttttgcgcctgggcaatggtatcgtcgtcaagatgggcgatcagccggtcggcggcggcccatgcctcttcttccgtttcgcgcacaatgacgtgcagacgaatgccgtactgcaggatgcgtccgcgggccgcggcgcgctcgcgcaccaccgccagcttctccgccaccagttccgggggttcgccccacgtcagatagctgtcgatctgctcggccgccacatcaatggccgcatcagaagagccgccgaaatagagcggcgggccattctcctgcaccggcgggaacaacacctcagcgccttccacgtgaatatgctcgccgtgataatccactttttccccgcgcagcaggcgggtgtaaacatcaagaaattcgcgggtcacatgatagcgctcgctgtggctgaggaagataccgtcgcctttgttttccaccgggtcgccgccggtaacgacgttgatcagcagccgaccttccgataaacggtcgagggtggccgccatccgcgccgccagggttggcggctgcaggcccggcctgaccgccaccagatagcgcagacggcgggtcaacggcgccagcgccgaggccaccagccacgaatcttcacagcttttaccggtggggatcagcacgccgtagtagcccaggctgtcggctgccagcgccacctgctgcagataaggtaaatcgaccgggcgtccaccctcggtggtacccagataacggccatcgccatgggtaggtaagaaccagaagacattgatcttgtcgggagcttgctgcgtcattatctatttcctatataaccatatccgatatttattgaagagatgttttaatttggttatatgagtgttagcgataatcatgccaatggtgaataaaaaattaatcttttaaaatcaatgccctgaaaacggcttcgccgcgccgcgctgttgcaaatcgcgcagccgccgcgcatccgctggcgcatttgcaacagccgcgggccttccccctctggtttctgcggccgccgcaggataagttcagagcatcaacgatcggaggccctctatgctgaacccagaatccccttccaccgctcccgcgctgatcgacccggcgtcgaaggccttccagagcctgctggacaaactcgcgccaacggaggcgaccgtgctgatcgtgggcgaaaccggcaccggcaaggaggtggtggcccgctatctccatcatcacagcgcccgtcgccagcagccgtttctggccgttaactgcggcgcgctgaccgagagcctcgccgaagccgaactgttcggccatgagaaaggcgccttcaccggcgcgcagcagggacagcccggctggtttgaagccgcggaaggggggacgctgctgctggacgagatcggcgaattaagcctgccgctgcaggtcaagctgctgcgagtgctgcaggagcgtgaaattacccgcgtcggctcacgcaaagcgattaaagtgaatgtccgggtgattgccgccacccacgttgacctggcccaggcgatccgcgagcgccgctttcgcgaggatctctactatcgactgaatatcgcggtggtgccgctgccgccgctgcgccagcgtcggcaggatatcccgctgctggcgcaccactttttatcactctacgcccggcgcctcgggcggccaaccctgcgtctggcgccggaatcactggcccggctgatggactattcgtggccgggcaatattcgcgagctggaaaacaccctgcacaacgcggtgctgctcagtaaagaagaggagatcagtcctgcccagctgcgcctggcgacgctcaacgacgccccgggggcggcgagcgatcatgaactggacgactttattcgccaccagctggcgcttcccggcgagccgctgtggcagcgagtgaccagcgccctgattcgccacgccatggcgcattgcgacgataaccagagccaggcggccgcgctgttggggatcagccggcataccttgcgcacccagctcgctaacctcgggctgatcaaaagccgccgccgcccgcctgcgccgccgcgggcgttcgccaacgcagccggggccgatcgcgaactgcgcattggctaccagcgcttcggcagcctcgggatcctgaaagcccgtcagagcctggaaaccgccttcgccagcctcggcgtcaacgtgctgtggagtgagtttcctgccggaccgcagctcctccacgccctcgcctgcaacgagatcgacttcggcaccaccggagaagcgccgccggtgtttgcccaggccagcaatagcgaactgatgtacgtggcgtgggagccgccggcgccgcgcagcgtggcgatggtcgtcccgcaggagagcgacattcgccagctcagcgatctgcgcggtaaacgcatcgccctcaataaagggtcgaatgtccactggctgctgctgcagatcctcgaggacgccggcctgggtctgaacgatgtgcgggtggtctataccccgccgaaatatccgctgaccgccagcgactatctggcggttgacgcctggatgatgtgggatccgctgctcagcgacgccgaacacaccggcgagctgcgggtggtcgccagcggcgaaggccgggtcaacaaccatcagttttatctttcgcgacgggactacctcgctcagcatggcgatatcatgcgccgcctgctgacggagctgacccacaccgggcagtttatcgactcgcatcgcggcgaagcggcccgcttactctcggcagagctggggatcgacgcccggtcgctgagcatggccctcgcccgccgcagccatcgcccgcggccgatggatctgtcggtgatccgcgcccagcagaccatcgccgatcgcttttacgccctcgggcttatcgccaaaccggtcccggtgcgcgaagcggtgtggtacggcgaacccgcgccggacgtcatcagaccgctgatggcggtcagttagcgaaatttgcgcgttatcttcctgattgttcaggcgcagatagcctcgatctgatggcgatgttaccctaaagacgctgagaataagggggggtatctgtggctgttcatctgttaatcgtcgacgcgttaaatctaatccgccgcattcacgcggtgcagggttcaccctgcgtcgatacctgcctgcatgccctggagcagctgatcgtccacagtcagcccacccatgcggtggcggtgttcgacgatgaggatcgcgcccacggttggcgtcaccagcgcctgccggagtacaaagccggacgcgcgccgatgccggagacgctggtggccgagatgccggcgctgcggaccgccttcgaacagcgggggatccgctgctgggcctcgccgggcagcgaagcagacgatctcgccgccaccctggcggtgaaggtggcccaggcgggccatcaggccaccatcgtctccaccgacaaaggctactgtcagctgctgtcgcccaccatccgcatccgcgactactttcagaagcgctggctggatgcgcccttcatcgccagcgagttcggcgtcaccccggagcagctagcggattactgggggctggcggggatcagcagctcgaaggtgccgggcgtggcgggcattggacccaaaagcgccgcccagctgctgaacgagtttcaggacctggaggggctgtacgcccgtctggccgaggtcccggagaagtggcgcaaaaagctggccgcgcatcaggagatggccttcacctgccgggaggtggcccgcctgcagaccgacctccagctggacggcaatctgcagcagctgcggctgacgcgctgaccatcgttaagaggtgcgccggtgcagggtaactgcctgctttacccgggccaggcaatcaccaggccgcctgatataacccgacgatatccgccaggctcgcctcgcgcgggttgccgccggtacacacatccgccagcgccgcctgggccagcgccggaatatcctctttcctgacgcccacctcacgcagatggccgggaataccgacatcgcggttaagctggcagaccgcctctactgccgcctcgcgcgcggcggtcaggcttaacgcttccaccctaacgcccatcgcccgggcgatgtcgcgatatttttccccggtcgcctcagcattaaagcgcatcacgtgcggcagcaggatggcattcgccacgccgtgcggcgtgttgtaaaaagcgccgagcggatgcgccatgccgtgcaccaggccaagcccgacgttggaaaatcccatccccgccacatactggccgagcgccatagcttcccccgcgccggcgtcgccggcaaccgagccgcgcagcgcgccggcgatgatctcgatggccttgaggtgcagagcatcggtcaaagcccaggcggcgcgagtgaggtacccttcgatagcatgcgtcagggcgtccacgccggtagccgccttcagcgccggcggcatagcgtccatcatatcggcatcgataaaggccacctgcggaatatcgtgcgggtcgacacagacgaatttgcgccgctgttcttcatcggtgatgacatagttaatcgtcacctccgccgcggtacccgcggtggtcggcaccgcgaagatcggcacgctgggctgacgggtgggcgacagcccctcgaggctacggacatcggcgaattccgggttacgctgaataataccgatcgccttacaggtatcctgcggcgaaccgccgccgatggcgatcaggtaatccgccccgctgcgttgaaaggcctgcagcccctgctggaccacggcgatggtcgggttagggatcacgtcgctgaatatatcccatgccagcccggcggcatccagtttgtcggtgactttcgccgccacgccgcagcgggcgagagtgctgtcggtgacgatcaatgctttacgatagccgcgccgcaccgcttcatcggttaatgcgtttatcgccccccggccaaaccatgccgtttcattgaggatcattctgtttgccatcgtggctctcctgttagcgttgcggcatcactcttcaatgcgtaatccgtaggttttgaacttctccagcacgatggcgatcgcctcgtcatccagcaccgggaccgggtcggtaatcgccagcgtactgaggtagagctgggccaggacctccacttcatgcgccagccagagcgctttctccaggctggcctcgcaggcgatcaggccgtgatgctgcagcagcgtggctttgcggtgcttcagcgccaccgcgacatgctcagacagttcgcgggtgccgaaggtggcatagggcgcgcaggggatcgaattcccgccggccgcggcgatcatatagtgaatggccgggatgggccggttgaggatcgacaccgccgtacaatggacagcgtgattgtggaccaccgcctgggcatcgggtcgcgtctggtaggccgcctgatgaaaacgccattcgctggagggcagttttccctgctcatgctggccgtcggcatcaataaagacgatcttgtcttccgtcagcttttcatatgggataccggtaggggtgatcagcattcctccctgatagcgcacgctgacattgccggcggtcccctgatttaaccccaggcgggtcatttccaggcaggtatcgataatctgccgggccagtctgtttctttccattgcgttcctcttttggtgactcatcatccatcaacggcagggcaacagaaatatcgtcggctaccgtgggatagggtgaataatgatcttcatcatcaacctgaatattcaaaggggaattttcatgattattttttgtgagccgcgtcaattattccgccatgaataaagcaaccacgcccattacgagagagattaaaatgcccgttcttaataatatttcatcaagcgggcattttatttctttgtaacatttgcccgttttccacgatatatattcattcggtcattagcgttgtggttttgtgaatttattttctcaaacggtcagcgtttttgaaaaattaaagtgacaataatcacataaaatggcccacagtacgttaagtgtgaccatcatcatattaacagacggtttttatttgaaaatgaagccatgagttccgccgtgactttcatttcactcaccggcgcgtcacctgagctcacttaattttgcggtctgctgcagcaccagactgcgccctgaatgctgttgtaaatgcttctgaactgatgaggacgctatgggaaacacaacgataccaacgcaaagttaccgcgccatggagagcgggcagagtaagagctacattattcctttcgctctgctgtgctccctcttttttctgtgggccgtggctaataatctgaatgatattttattaccgcaatttcaacaggcctttaccctgactaacttccaggccggattaattcaatcggccttttactttggctattttattattcccatccccgccgggatgttgatgaaaaaattcagctacaaagccggcatccttacgggtctgtttttatatgcctgcggcgccgcgctgttctggcctgccgccgaagtgatgaattacaccttatttctcattggattatttattatcgctgccgggcttggctgtctggaaaccgcggccaacccgtttgtcaccgtcctcggtccggaaagcggcggtcacttccgccttaatctggcccagacctttaactcattcggcgccattattgccgtggtatttggccagagtcttattttgtctaacgtcccgcatcagccgcaggaggtgctggataaaatgacgccggaacagctcagcgcctggaagcacagtctggtcctgtcggtacaaaccccctatatgattatcgtggccattgtcctgctggtcgccctgctgatcgtctgcacccgcttcccctccctgcaaagcgatgaccacagcgacagcgcgcagagcacttttttcgcttcgctgacgcgcctgatgcgcatccgccactggcgctgggcggtactggcccagttctgctacgtcggcgcgcaaaccgcctgctggagctacctgattcgctacgctatcgaagagatcccgggcatgacggccggtttcgccgccaactacctgaccgccaccatggtctgcttctttatcggccgttttaccggcacctggcttatccgccgcttcgcgccgcacaacgtgctcgctatctatgcgtttatcgccatgctgctctgcttgctctccgccttcagcggcggccacgtcggtctgctggccctgaccctgtgcagcgcctttatgtccattcagtacccgaccatcttctcgctggggattaagcatctgggccaggacaccaaatatggctcgtcatttatcgtcatgaccattatcggcggcgggatagttaccccggtgatgggctttgtcagcgacgccgccggcaatatcccgaccgccgaactggtcccggcgctgtgcttcgccatcatctttatttttgcccgtttccgttcacaagcggcgacgaactaagcctgttatccgcataacctgagggatctgtaatgaaaaaaatcagcttaccgaagatcggtattcgtccggtaatcgatggtcgtcgcatgggggtccgcgagtcgctggaagcgcaaaccatgaacatggcgaaagccaccgccgcgcttatcagcgagaaactgcgccacgcctgcggcgcccgggtggagtgcgtgattgccgatacctgcatcgccggcatggccgagtcggccgcctgtgaagagaaattcagcagccagaacgtcggcgtcaccatcaccgtcaccccctgctggtgctacggcagcgaaaccatcgacatggatccgctgcgcccgaaggccatctggggctttaacggcaccgagcgtccgggggcggtctatctggccgcggcgctggcggcccatagccagaaagggatcccggcgttctccatctacggacatgacgtgcaggatgccgatgacacgtcgatcccagcggatgtcgaagaaaagctgttgcgcttcgctcgcgccggcctggctgtcgccagtatgaaagggaaaagctatctgtcgctgggcggcgtctcaatgggcatcgccggatctatcgtcgaccacaacttttttgaatcctggctcggcatgaaggtgcaggctgtcgacatgacggagctgcgccggcgaatcgatcaaaaaatctatgatgaaaccgagctggagatggcgctggcgtgggcggataaacacttccgctacggcgaagatcagaacgctgagcagtataagcgcaatgaaacgcagagccgcgcggtgctgaaagagagcctgctgatggcgatgtgcatccgcgacatgatgcagggtaacccgaagctcgcagaaaaaggactggtggaggagtcgctgggctacaacgccatcgccgccggtttccagggtcagcgccactggaccgatcaataccccaatggcgataccgccgaagcgctgctcaacagctcttttgactggaacggggtgcgcgaaccgtttgtcgtcgctaccgaaaacgacagcctcaacggcgtggccatgctgatgggccatcagctcaccggcaccgcccaggtgtttgccgacgtacgcacctactggtcgccggatgccgttgaacgggtcaccgggcagccgctcaccgggcgggcggagcacggcatcattcacctgattaactccggctctgcggcgctggacggctcctgccagcagcgcgacgcgcagggcaacccgacgatgaaacctcactgggagattgagcagaacgaggcggatgcctgcctcgcggcgaccgaatggtgcccggcgatccacgaatacttccgcggcggcggcttctcttcccgcttcctgaccgaaggcggcgtgccgttcaccatgacccgggtgaacatcatcaaaggtctggggccggtgctgcaaattgccgaaggctggagcgtggcgctgcccaaagcgatgcacgaccagctcgacgcccgcaccaactccacctggcccaccacctggtttgccccacgcctgaccggcaagggcccgttcagcgatgtgtactcggtgatggccaactggggcgccaaccacggcgtgctgaccatcggccacgttggcgcagatttcattaccctcgccgccatgctgcgcattccggtctgcatgcacaacgtggaagaggcgaaaatctaccgcccttccgcctgggccgcgcacggcatggatatcgagggccaggactaccgcgcctgccagaactacgggccgctgtataagcgttaacaggttggtttcgcccggaggagcaggcttacctggcctacagacgcgcgcggtctgtaggccggataagcgctgcgccatccggcaatgttgtttcgggagtcactatgaagcaagacgttatcctggtcctcgactgcggcgccacgaacgtgcgggcgatggccgtggatcgacaagggaaaattatcgcccgcgccgcaacggcgaacgccagcgacatcgcggcggaaaaaagcgactggcaccagtggtcgctggaggccattatgcagcgctttgccgactgctgtcggcagatccatgaccagctggcctcctgcacggtgcgcggcatcaccgtcacgacctttggcgtcgatggcgcgctggtggatgagcagggcgccctgctgtatccgatcatcagctggaaatgcccgcgcaccgcggcggtgatggagaatatcagccagtatatgcccgcgcgtcagctgcagcagatagccggcgtcggcgcgtttgcgttcaataccctgtataagctggtgtggctgaaagagaaccacccgcagctgctggcgcaggcccatgcctggctgtttatttcatcactgatcaaccatcggctgaccggggagttcaccaccgacctcaccatggcaggcaccagccagatgctcgatctccggcagcgcgatttcagcgcgccgatcctgcaggcgaccggcctgccgcgccgcctgttcccgcggctggttgaagcaggccagccgatcggcgccctgctgccggaggccgctgcgctgctgggcctccccgtcgggatcccggttatctcggccgggcatgacacccagttcgctctgtttggcgccggcgccgggcaggatgagccggtgctttcctccgggacctgggagatcctgatggtacgcagcgcgcaggtcgacacctcgctgctctgtgactacagcggctccacctgcgagctggacagccagccgggccgctataacccggggatgcagtggctggcctccggcgtgctcgagtgggtgcgcaaactgctgtggagcgctgacaccccatggcagacgctgattgacgaagcgcaggcgatcccgcccggcgcccagggcgtcaggatgcagtgcgacctgctcgccagccagcacgccggctggcagggcgtcacgctcaacaccacccgcggccatttttaccgcgccgcgctggaggggttaagcgatcagctggcgcagcatctgcaaaccctggaaaaaatcggcggcttcagggcgaaagagctgctgctggtgggcggcggcagccgcaacgcgctatggaaccagatcaaggccaaccgactcgggataccgatcaaagtcctcgacgatgccgaaaccaccgtggccggcgcggcgatgtttggctggtatggcgtgggcgagttctcttcgccagaacaggccagagcgcaggtcgcgtaccgctaccgctatttctggccgcaaactgaacctgaactgatagaggaagcctgagatgctcaaaaccatttccccgctgatatcgccggaactgctgaaagtgctggccgaaatgggccatggggatgaaatcattttttccgatgcccatttcccggcgcacagcatggggccgcaggtgatccgcgccgatggcctgcgagtcagcgatctgctgcaggcgattatcccgctgttcgaattagacagctatgcgccgccggtggtgatgatggccgccgtcgaaggcgatgcgctcgacccgacggtggaacagcgctatcggcaggcgctatcggcgcaggccccctgcccggatatcgtgcggattgaccgctttgccttctacgaccgggcgcaaaaagcctttgcgatcgttatcacaggagagtgcgctaagtacggaaatatccttttaaaaaaaggagtcacgccgtaatctcatgccggagcgtctgcctgatgcagacgctcaatcaatgatgggatgagaataaatgaaagcagcccgccagcaggcgatcgtcgatctcctgatcacccacagcagcctgaccaccgaaacgttgtcaaaacagctcaacgtcagcagggaaactattcgccgcgatctgagcgagctgcaggcgcagggcaaagtgctgcgtaaccacggccgggccaaagtgatccaccagcgcagccaggacagcggcgatcctttccacatgcgcctgaaaagccattacgcgcataaagccgacatcgcccgcgaagcgctggcctggattgacgaagggatggtgatcgccctcgatgccagctccacctgctggtatctcgcccgccagctgccggaccgcccgctgcacgtctttaccaacagccagcccatctgccaggagctggccaaacgcgaccagatcacgctcacctgctccggcggcactctgcagcggaaatatggctgctacgtgaacccggcgctgatttcccagctgaaatcgctggagatcgatctgtttattttttcctgcgaaggcatcgacccgcagggcgcgctgtgggactccaatgcgttcaatgccgacttcaaatcgatcctgcttaagcgggcggcgcagtcgctgctgctgatcgacaaaagcaagttcaaccgctccggcgaggcgaggattggtcatctggatgacgtgacgcatattgtgtcggatgcgccgcagccttaaggggaaggccggaggacgcgcacgcgtctccggcctgaggggaaggattaacgctcgtcgcgacgtccgccgacggcggcccacaggcggcgcacgtgaacggtcacctcttcacgatcgtgatacagctgacgcgcctggatctgggcgttaacgccgtgctcgtccagctgggcctgaatataggccagattctgcgacacctcttcatagcgctttttcatcggcagcttgaggttgaagatggtctcccggcaccagccgttgaccagccactgcgccatcagcgccgccaccttcgccggtttctccaccatatcgcagaccatccacgagatgttgttgcggttcggacgatagcggaaaccgtcttcgcgcagccaggtcacctggccggtatccatcaggctctgggccatcgggccgttatcgaccgaagagacccacatgttgcgcttcaccagctgataggtccagccgcccgggcaggcgccgagatcgacggcatacatgccgttcgccagacgctcgtcccactcgtccgccggaataaaaacgtggaacgcctcttccagcttgagggtggaacggctcggggcgtcggacggaaacttcagccgcggaatgcccatatagaacggtgagttgttgttgctgtatgagtagccggtatagcagcagccgggggcgataaagaacacatgcaccaccggtcgctttggcgtttcatagttggtcagcacgcccgcctcgcgcagcgccgcgcgtaacggcaccgtaaacttgcggcagaacttcatcagctctttgctttcgttggtatccgccacttccacacgcagctcgccacccttctccaccacgccctgcagcatgccgacgatcggggttatgcgatcctccggcggcaggtcgcgcagcagttcgccgaccacaaacatctgtcgggcgaaaattagcgagctgaacggcagatcgcgcaccagcttctcgccgtcgtcctgctgataaccttcaaaaattacatagccagagtcttctttgacccgggcaaaaccaaacacctcaaggcgggctgccttatcggtaatttctgctgcgcactctttctcaaacccagggcgacaatagaggacaaccttattcatgaacaacgcccttacgtttcagacgaattgcaccaattaacattaaaacccaaccggcgaggaagcttacgccgcccaccggggtcacgaacgcccacagacgtaaatgagagagcgccagacaatagaggctgccgctgaacagcacggtccctaacgccagaaatacgctgctccagtagaaccagatactgatccgacgctgcatcgccaccgccagaccaaaaatcgccagggtatggaaggcctgatactccaggccggtatggatccaggccatctccgccgcgccgagcgattgacttaagacatgcgcgccaaaggcgcccagagccacaaagataaagccgctaatcgcggcgaatatcagcataaaacggctggtcatgttgttaccctacaagtaattattgttcataacgaaagcggaatttttcttgttcacttgccgctttcgccaggatccactgccggaaagcggctattttacccagttctgcctgactgtcatggcaaacaaggtaaaacgcattcttactgaccagaacatcattaaacggacacaccagacgaccggcttcaatttcggactgcgccatcacgttgttggccagcgccacgccctgcccgtgaatggccgcctgcagcaccatcgcgctatggctgaaaatcggcccctgctgcacattaatatggcttagaccaagctgacgggtataagtttgccagtcgcggcgggacgcatcgtgaagcagggtatgttgcgccagatcggcaggcgttttcaatgccttgtcgccggtgagcaagagcggggaacagaccggcagcagatactcggcgtacaatttttccacacgcaggcccggccagttgccgcggccgtaaaaaatcgccacatcgacatcgtccgccagcttatcctcctgacggtccaccgcctggatcctgacgtcgattcccggataagctgagttaaagcttgttagtcttggcaccagccactgaatggcgaaacttggtaataaactgaccgttaatgcccctttggcgctgcgcgcctgcagtttacgcgtcgcttccgtcagttgcgaaaaaatctctttaatatcctgaaaatagctctgcccttcttccgttaacagcagcgaacgattgcgccgacggaacagcttaaggcccagaaaatcctcgagagacttgatttgatggctgactgcggcctgcgtcacaaaaagctcatcggctgcccgagtgaagctgagatgacgtgcggctgcatcaaaaacacgtaatgcattcagaggtggtaatcgcttcgacatggttattctggcttagatgttaactcaatttaacaaataggaaacaatgattaacctattagttttttttatctgagccattataaattgtccgttgaggttctaccagcaaatacctatagtggcggcacttcctgagccggaacgagaagctttttttggaatgcgtgttccatcaagcttttggcttacggttgtgatgttgtgttgttgcgtttgcaattggtctgtttttgcagaccctggtagcaaagctaccccttttcacttcctgtacatttaccctgtctgtccatagtgatttaatgtagcaccgcaacgcgcggtgcttttttttgcctttttactgccttactcgtccagttcacccagttgtttcacgtcagagcgattgatctgttgtttgttgccccacgcgtctttatacgagatcatgccagtgtcattatcggtttgcggtttcccgtcggtaacgatggtccgcccatcgttggtatgcatcacatagttagaggaacaggcgctcaggcctaaagtcagcatacaggcagagataatcgcagcggccttagtcattttcattcttctctccttacggctatttatactattcgtaactcgttaagtaataggttaaaacacaaacccaacacttttcagcataaccctctttgaccgacgtggagtcacattcggacaattccacaggacgcagagaccttgtcacgcccggcaaattgcgcgacgatcgcggtattgatacgaggaattccatgaacgcatttaacccggcgcactttcgcgcgcagtttccggctctggccgatgccggcgtctatctcgacagcgcggcgacagcgctcaaaccgctggcggtgatcgacgccagcgaccagttttatcgcctgagcgccggcaatgtccatcgcagccagttcgccgccgcccagcggctgaccgagcgctacgaggcggcccgtgatcgcgtggcggcgtggcttaacgccccgtccggcaaagatatcgtctggacgcgagggaccaccgaggccatcaatatggtggcgcagagctacgtccggccgcgcctgcagcctggcgatgaaattatcgttagcgaagccgagcatcatgccaacctcgtgccctggctgatggtggccgggcagaccggcgccagagtggtcaaactgccgcttggcaccgaccgtctgccggatatcgccagcctcagcgcgctgattaccccgcgcagccgggtgctggccatcggtcagatgtccaacgtcaccggcggctgcccggacctggcgcaggctatccgccttgctcacgccgccgggatggtggtgatggtcgatggcgcccagggggcggtgcatttccccgctgacgtgcaggcgctggatatcgatttttacgccttttccggccataagctgtatggcccgaccgggatcggcgccctgtacggcaaaagcgagctgctggcagcgatgtcgccctggctcggcggcgggaaaatgatcgccgaggtcagctttgacggctttacgccgcagccggccccctatggcctcgaggccggtacgccgaatgtcgccggggttatcggcctcagcgccgcgctggagtggctggcgcagagcgatatcggccaggcggaaaactggagccgcagtctggcgagcctggcggaagaggaactggcgaaacggccgggcttccgctctttccgctgccagcagtcaagcctgctggcctttgaatttgagggtattcatcacagcgatctggtgacgctgctggcggagtccggcattgccctgcgcgccggacaacactgcgcccagccgctgctggctgccttaggggtcagcggcaccctgcgggcctctttcgccccctacaatacccaagacgatgttgcggcgctggtccacgcggtggatcgcgccctggaaattctggtggattaatgacaactctgcaccccttcggcacaaccattaccgacgctacgctgcgccagatcttcgccccgctgaaccagtgggaggataaataccgtcagctgattttattgggcaaaaagctgccgacgctgaccgacgagcgcaaagcgcaggcccatgagattgccggctgtgagaaccgcgtctggctgggctatgaggaggacgccgagggcaggctgcacttctttggcgacagcgaaggaaggattgtgcgcggtctgctggcggtacttttaaccgccgtggaaggaaaaacccgcgccgggatcctggcgcaggatccgctggcgctgttcgacgagctggggctgcgcggccagctcagcgcctcgcgcagccagggcctcagcgccctcagcgaggcggtgctcgccgccgcccgcgaggttgaggtttaagctcatcccgggggcggcgcttgacgcgccttgcccgggctacgggctcgtgcagttttgtcgcccggacaggtgcgcagcgccgcctccggggaattgtcctgtagaccgggtaaggcgcctgcgccgcgacccgggatttacgtcgtctgccgctccgccttcgccagcatcttcttcagggcatgcgacaccgcgacgaagccaaaggtcgcggtcaccatcgtcgccgcgccaaagccggaagcgcagtccatccgcttcggcccttccgccgtgctcttcattgcgcagacgctgccgtccgcctgcgggtagaccagcgcttccgtagagaagacgcagtctacaccgagcttacctttgctgtttttcaccaccccaaactggcttttcagccgctcgcgcagtttggccgccagcggatcctggatggtcttcgccaggtccgcgacctggatctgcgttgggtcaatctgaccgcccgccccgccggtagtcaccagcggcaccttgtagcggcgacaccaggcgataagcgccgctttcggccggacgctatcgatagcgtcgataacatagctaaagccgacgccaagatattccgccacgttttccggggtcacgaaatcatccaccaccgtcacccgacactccgggttgatgagacgaatacgctccgccatcacctccgctttcgccagcccgacgttgccgctgagggcgtggatctgacgattggtgttggtgacgcagacatcgtccatatcgataagggtgatcgccccgatgccggtccgcgccagcgcttccgccgcccaggagccgaccccgccgatcccgaccacgcagacgtgggcgtcggcaaaacattgcagcgctttttcaccatataaacgtgccgtaccgccaaaacgctggcgccaggcatcgctgattacaacagacatagaacctcagaacaaaatgacagcgcccggaggccgccgtaaacggcgtcatccgggcgccctggtcaacaggcatggccaggggagttagccgctaaaaacattccccgcgcccggggcgtttttcagcacccatacgcggccgtagtggttataccagccggcacggtggcccgcgtcaggcccaatgccctgatagatgtcgaaatgctgacctttgatggccccgccgacgtcgagggcgaccatcaggcgcagttcgtactggccgttaaacttgccgttattatccagcagaggcacctcggccagcaaggtggttcctggcggaataatcgaccggtcggaggccaccgaggcgcggccgatcagcggcacagcgctggcccctttcaccggcgcgaaagactgcggtttaaagaacacgaacgacgggttctgctccagcagctcacgcacttccgcttcgctgtgcttctcaccccactcgcggatcgcctgcatcgacatatcttctttcttcacttccccgcggtcgattagcactttgccgatgctgcgatagggccagccgtttttcccggcatagctaaagaagttgagcggcgaaccatcgccaaagtcgatatagccgctgccctgcacgtccatgatgaagttatccatcagcgagttgctgtacgccagcacatagttatcgctcagcgcgccggcatagatgctggcgcgggaaggcagcttaccgcgcttcggcggcatacggtaaatggggtactggaattcgccctgacgggtgtggcgcgcctgcaccaccggcgtgtagtagccggtaaactggacgttgccatagttgtcgacgccctgcatctgccaagcgtcgatgccaaactggcgcagcgtacgggtgtcgccgccggcgcgcagccactcctgcagcgcgttgtagacgttgctctggctattatagaggcgtggcgaggcgttacgaatttgattaacctgctcggagaagtcgccggcgttgatcggtgccccgacggcatccggctggtttaccagtgaaaacggctgggtgaacttgccatcgctatattgctgaccgcggtcggtcggttttgaggaacaggcggcgagcatggccagcattgcccccgtcgctacatattttgcccaacgtcctttcatggtgtctcatcttttgctgcgaagccttagtgcgtgttgaagataacaaagcgccggagctattgaaatgcgcgatctcatcgatggcacagatttgtgtaaaaaaacaccacaacatggcgttttataagccaattcttacaaaaatgtcgatttggtcgaaaaaaggttgcatcatctcgctagcggagtatagtgcgcttccacggacgcggggtggagcagcctggtagctcgtcgggctcataacccgaaggtcgtcggttcaaatccggcccccgcaaccaattaaaatttgatgaagtaaagcagtacggtgacgcggggtggagcagcctggtagctcgtcgggctcataacccgaaggtcgtcggttcaaatccggcccccgcaaccaatcaaatttgacaaagtgaagcagtacggtgacgcggggtggagcagcctggtagctcgtcgggctcataacccgaaggtcgtcggttcaaatccggcccccgcaaccaacattacaaacaccctcaagggtgttttttgtttctgccgccggcaaaacctctgccgaaaacgggaacggccattgccgcccccatctcctgcttaccccttcggtaacacaatattgcttgccgccagcatgcccatgcgatggtacatcgcgcaggccgcctcgacgatcggcatcgccagcgccgcgccgctgccttctcccagacgcatgcccatattgagatacggttcgagacccaggtgcgccagcgcgatacgcgcccccttctccgccgaataatgggacgggatcagatacggtttcacctccggcgctatctgacacgccgccagcgccgccgcgtaggagagaaagccatccagcaccaccggcagcccacaggacgccgcccccagcatgacaccggtcatccccagcagatcgaaaccaccgactttgctcagtacgtcgaggccatcattcgggtcgggctgattgacggcgatagcccgccgcaccacctccaccttgttgccaaccttcgccagcggcagattggcgccaatcccgaccacctcctgcgcatcgctgccggtcaggacgctgacgatcgctgccgccggcgtggtattggccatccccagttcgccgacgccaaacagggtaacaccctcctgggccagcgcgcgggtgtagcgcatcacctccagcaacagctcctgcccctgctcacggctcatcgccggaccgcgggcaatattgccgcagccccgcgccacccgcatattcaccacgccggggagcggttcgctatcgataccgacatcaattacatgcactttcgccccggcctgggcggcgagcacgcagacgccggtggtgccgcgggtcatatttgccgcctggatggcggtgaccgccttcggcgaaatcgccaccccttcgtcccacactccatggtcggcgcacatcaccagcagggcctttttcgccacctgcggctggccgcccaggccgggcattcccgccagctgcaccgccagcgcctccagacgcccgaggctgccggggggcttgagtaagccgtcgatgtgttgctgtgcccgcgccatggagtcggcgtccggcgcggggatcgcccgcagaaccgtgtttaaattttgcatacagaatccctgccagggctggcccggtcagccagcgattgagttatttgattttgacgccgatgccggagaccaccagccagaccgcatccgccgcggccgccaggcgctgattgacccgcccggcaatatcgcgaaaatgccgcgccaggcggttctccggcacaatgcccatccccacctcgttggtcaccagcacgacgtgcgccggacagcgctgacaggcggcaatcagcacgccaatttcgtcatcaatagcctgttccatggcggcgtaatcccagccgtcggggtcgctgtcgccgccgagcgcgaacagcaggttggtgaccatggtggtgatgcattccagcaaaatcgcctccgctggggcgatagccggggtgatcagttcatcaagctgctgccagcgctcggcggtgcgccagtgggcgggcctgccgtcgcgatgatgctggatccttgcggccatctcgtcgtcaaagatttgcgaggtggcgatatataacacctgcggcgcatcggcaatcagcgcctcggcatggcgacttttgccgctgcgcgcgccgccggtaaccagagtcagcataggggctcctgatgttggcgcatgatggcgtaaattttatcgatggcgatatgttcgcgcatggcctcggccagccgatcaaactgccgggttttatagcgggcatactccagggcgctgtccagcggcgccagccctttgcgctggcgcaggccgttgagcagcgcccgggtaaagtcatcgctgtcgaacaggccatggagataggtgccgaacgccaggccgtcgtcgcttatcgccccgtcgtccactgcctgccccgctttatgcagctgcagcagcggcgggcagcctgcctcgcggcgcgtctcgcccatatgaatttcgtagccactgacgcgcagccccgccgcgtcggctaaccaatccgggagcgcagaccccagggtcgcctgcacctgggtggtggttttgtgctgggcgaagtgggtcacggtcttcagcacccccagcccgggctgggcgccaaggccagactccacctcatcgataatggtttcgcccagcatctgatagccgccgcagatccccagcagcggcaccttgcgctgccgggcctgctcgaccgcgtgcgccatgccgctctcgcgcagccagcacagatcgccgagggtatttttactgcccgggagaatgaccaggtcggcgtcagccagcgcctgcggatcgcggacatagcgcacccggacatctggctgtgccgccagggcgttaaagtcggtaaaattggcgatatgcggcaggtgaaccacggcgatgtcgatatcgcgccggtcggtgcgatggtatttcccggcctgcagcgcgacgccgtcctcatcctcgagatccacgtcaagccatggcataacgcccagcaccggcaccccggtcaacgcctcgatttgctctatcccggagcgcaggagcgccacatcgccgcggaatttattgatgatcacccctttcacccgcgcccgctcctgaggctgcagcagcgccagcgtgccgtaaatcgcggcaaacaccccgccgcggtcgatatcggccaccaggatcaccgggcattgcgccatctcggccatgcccatattgacgatatcgcggtcgcgcaggttaatctccgccggactgccggcgccttccagcaccagcgcctcatactctccggccaggctctggtagaccgcgaggatctgctcgcgcaggcgcggcttgtactggtgatagctcaccgcatccatgctggtcgccacctgccccatcagcaccacctgcgcctgacggtcgctggtgggcttgagcaaaatcggattcatgcggacatccggcgcaatcccggccgcttcggcctggaaaatctgcgcccggcccatctctttgccatccggcgtaatgccggagttcagcgccatattctgtgatttaaacggcgcggtacgcagcccatcctgatgaaaaatgcggcacaatcccgccaccagcacgcttttcccaacgtcggaagccgtgccctgcaacatcactgccagcgtcatgacgcctcctttatcgcgcctatcgcgttgttgtgcatccgctgaaaaaactccgcctcggttttacacagcggcagccccagttcgctatgaagtttcaccagccacggctgcgtcaatcccgccctgtccatcgtctccgcgcaggcaaatacctcgccgggatcccccgcggccagtacttcgccgtgacgcagaacgtaaacggcgtcgctcacctcatagatcagatcgatatcgtggctggagatcaccacccgccgcccctgcccgacaatgcgccggatgatggcgatcatctgcgcccgcccgcgtggatcgaggcccgcggtgggctcgtcaagcagcaggtagcgagcctgcagcaccagcgccccggcgattgccacccgttttttctgcccatggctgaggcactggatcggctgctggcgaaacccctgggcatcgacgagggtcaacgcctcatccacccggcgggcgatctcctcttccgccaccccgaggttacgcagactgaaagcgatatcgctgtcgatatcggtatagaagatttgctgatccggatcctgaaacaccgtcgccacctgctggcgcagcgccagcagaccgcgcttgctgtaattcagcgcctctccctgccacagcaccccccctgctgcgggcgcagcaggccgctcaggttcataaacagcgtcgactttccgcagccgttggcccccaccaggccggtcaccgcatggcgggaaaaatccagcgtcagccctttaagtaccggctcatcctgatagcgaaaccagagatcggttgtggcaagcatacttatccttagaggtgaaaatcaccctggtacaatttgatatccagcgccgtgctcatctgctgatagcgcaggaggacgcgggtgaacagcagtcccaccagcatcgccagcgagcgatagccctgcggcacgctaccatagccaaaacgcagagtttgcgcgcggtgaatcgccatcgcctcgtctaacagaataaaaatgaagcgccaggtcagcaggatctgctccgtcaacagccgcggtacgcgaccgcgcttgagtaaaataatcagctgtgggaaaggcagattaagcaccagccagagcgtcgccgctatcgccgccaggctgcgccagaaggtctccccggccacggccagccccggggcggaaatccctatcgagaaagcgcccagtcggatgctggctaacagcatctgcgggtcgcggctgacgctgaacacaatggtcagcacgccgaccagcaaaaagccaaagggtagggccatccagcggcaccagcgccagaatgagacccgcagcagccagcaggtcagcgcggcggtcagcgccagcgtcagcgcctggccccacgccggcagcgtaaaggccagcgccatcagcagtagccagagcagaaacttccgctctggcgccacctgcagccagcggctctggtagctgagtcggtcaaacccggtcatcacggcgctgtctgcccctcgcatatccgagaatgtaaaaaatcaccgccgcgcccagcgagccctgcagggtaaacagcagactctcaatctcgccgctcgccggttcatatagcggctggaaccagggttgataatccggcgccaccacctggatctggctctccgcttcaccgtccgagccgccaaactcgccgccgtggttaataaaaaatggcaggatcatcagggcggccaccatcgccaacaggatcagggtctttttcatattaatgtccctccgcggcgatcagtcgccgtttggttagctgatcgtagatcatcacggtgagcaagccttccgcgatggcgatcgggatctgcgtcaggcagaagatgcccataaacttggcgatcgatccacctgccccggttgccggatcgggaaaggccaccccgagctggacggaggtgacaaagtaggtcatcagatccgccagcatggcgcagagaaagaccccgacatcgcgacggatccccgcccgacaggccagcttccacaccagatagccgaccatcgggccgatcaccgccatcgacatcccgttggcgccaagggtggtcaggccgccatgcgccagcagcagcgcctggaacagcagaacgatcgcccccagcaccgccaccacgcccggcccgaagaggatcaccgccagaccgacgccggtcggatgcgagcagctgccggtcaccgatgggatcttcagcgccgaaagaacaaaaataaacgccccgcagagggccagcagcaccttctgattgctctcttcctgaacgatacgccgcaggcgcaccaggccgtaccacaggcagggtaaaaacagcagccaccacgccagcgcccacatcggcggcaaaaagccctccatgatatgcatggcgaacgcctcctgcgggacgatgatcagcagaacagcggccgccagccccccatacgaaagctgcttcagcgatttcacctgattcattacgcctcctcccactgtttgttaaccaggatggtcgagaaatagggcagcggctggtcatcgctgacctcgcgcagacggcgccagcactgctcgcccggcagggtggcctctgacatcatcagcgccgcatccagcagccccgcctgcgccagcagcgccttaatgcgggcgaagcggccgtagactttcatcagcaccagactgtcatgctggcgcagcgccgcggcaatgtccgcttccggcgcggtgcaggagatcaccgccagcgactgctgctccatggccagcggggttttcgcccgtgcggcaatggcggcgaaggaggtaacgccagggacaatctccagccactccgggcagccaatccgctgcagcagaaagacccaggtgctgaacaacatggcgtcgccgagggtgataaacccgacctgcctgcccgccgccacctcctgggccagcgccgcggcaacgtcgttccacaccgcctctttttccgcgctgtcggcgctcatcggaaaatggcagcagcggacctccgtgtgtgcgcccaggtactcgcgtacgatggagagcgccaggctgtcgccgcctttgcggccggctggcgcatacagcacatccagctggccgaggatccgcgccgcacgcacggtgatcagatcggccgcccccgggccgctgctcagggcgtatagtttgccgctcatgctgctttctccatcgtgtcgttcagcgcctgctgcagatgggcgacaaacatcgcccgcaccgccggattctcccctaacccgttaagccacggcgtggcggggatcccggcggcattgaagcgggttttccacgaatcgtcttcgtcggaggccatatcattaatggcatgatcgccggccaccagcatcagcggcatcagatgcacgccggtcacgccctggcgggagagttcgttaatgacgatgtccacttcgggatagctttccaccgcccccacccgcgccggaaaaccctgcaccgccatcatatgatccagacaggcgtaggccgcgaaggcgtggtggctggcgccgtgccccataaacaccactcgctccgtcgccgccagcgttggcatctgctggcgcagggcctgcatcagctgcacgtaatcgccatgaccgctcaacagcggcgcgcccagcgtcagacgctgaaagcgcgggcgcatgctctgcacttcgcgaacgatcttctcgtactcgtcgccgttgataatgtgcagggactggatcgccacatcctggtatccctgctcggccagcttttgcagagcctgcagcggagtatcgatatgaataccgtcgcgctgctgcagtttgcgaataatcatccccgaggtgaaggcgcggaacagcgtgcggtccgggcagctggcggccagatcgcgctcgcaggcggcgatgttcttttcgcgggtgtcgtgatagctggtgccaaagctcaccaccagaagtgcttttttcatatcctcttcctcaagtcgccgacagccagcgcgtcagccgcgcagtgaaatcggcctggctttgcagtagttcatcgcccgtcaccagcggcgccggacgggtaatgacgatgcaggggatccccgcatcaagacagggttgtactttttcctgatagcctccttccgcccccgaggctttcgtcaccacaacatcggcccggcactggcgataaaaggcggcgttaaattcggcgctgaacggcccgcagagggcgaagatctccccgacgccaaaccccagatcgctacagtgctgaaccacctccggcaccggcagcacccgggcgagcagcgttttctccgccagtcccgcccgccaggccgccagatctttgctgccggtggtcagcaggatccgctcgccgaagcgacgagccaccgcgcaggcctcgttcagatcgccgaccacgtgaagtagcggatggcgcagatcgctcagctgctccggcctttgatagcggctgagcagaaccccgacgctagcgcaggcgcgcacaatattctggctgaccacctcggcgtaggggtgagaggcatcgatcacccagcgggtgcgctgcgctctgagccactccgccatctgctgccactccattcgcccgcagcgtatctgcccgcggatatcgccggccagccgctcgccggtaggggtcgccaccgacagggtgtagcgcacgtcggcggcgtccagctgctggcagatcgcccgcgcatcgctggtgcccccgataaccagcacgtcgccgtgattcacagcgcgtagcctcgcggggtgatcatcaggccgttgtcgatgtaagtcgctttgttgccaacgatcaccagactggtcatatccactggggcaaaatccatctccccgagggtggtcagccatttctcctgctttttgcgtccggcggatttgactacgccgaccggcgtatctgcgcttttactggccgccagcagcgcaaaggcgcgcgccagatgtccttcgcggccgcggctgcgggggttgtagaaacagataacgaagtccgcttccccggcggcgactatgcgtttttcaatcaccggccagggcgtcagcagatcgctaaggctgatatggcagaaatcatgcatcagcggcgcgccgagcagcgaggcggcggcgatactggccgtcatccctgggatcagacggacctcaatgtccagctgctgcttattaaccagctccagcaccagccccgccatgccgtagatgccggcgtcgccgctgctgatcagcgcaacgttgtgcccggcctgcgccagctcgatggccgcctggcagcgctcaatctctttgcacatgccggttttgatcacctgcttgtcgccggtaaaggcttttaccaggtgggtgtaggtcttgtagcccaccacgatctctgccgcctgcagggcctccacggcttccatggtcatcatcgcctgcgagccagggccaattccgattacgcttaacatcagtgtgttactcccaaagtaatggtcacgccctgctcacgcagggtttcgccggacaggtttccctgactcagcagccaggccaccgggccggagacgctgccgacgccgaccgtctcccggacaaaagacgaggccggaaagcggtgctcgtgctcgcgcagcgcctcggcgctaaaggtttcgaacggcacccggcagcggtgagccagctggcgcaaccccggctcgtttgccttcaggctcacgctgccgatcgctttcagcgccagcgggtcaagacgctgagcggcaagctggcgatccagcaacgtactgagcagcgcgcagggggtgtcgcgccgacagccgatccccgccaccacccgctggggcaccagcttccagtgaggcaccggcagcggcggcagcgaccggcgcagggtgacgcagatcagggcgtcgagcgccggcaagcgcgccaggtcgcttaccgggataaacccgcgccggtcgcagcggcttagcgccccggtaaattcgccgtcgcaccacagccccacccgcttaccgctcaccagcatctggttaacggttttcaccgccgcgcgaaaatcggtcatccgggcgttcagctggaaggccagcgtgtcgagggcggccagctcgttgacgtcggtggcggtggtgatcaccgggtcggcgtcgagcatcccggcgagatagcgggtcagcgcattggcccccccggcatggccggagagcaagctgatgacgtgccgggcgcgctcatcaatcaccaccaccgccgggtcgctgagcttgtcattcaccagcggggccagcacccgcacggcaatcccggtggcgccgataaaaatcagcgccgagaagctgctgaacgcctcgcgggcagcgctggcaaagccgccgttgaaggggataaacccctcttcctgcagcgcttcgctggtgtaacaggtaagcggcagcatggccgccagccgttttgccagccgcacgccgccgggcgtcaggcaaaacagggcaatggattcaggctttacggtattcatggctaaaatccgctgcgtacagttttgagtagtgatactcatcgccgaggaaggggccgaccaggatcagcgccgttttgcggatcccggcgtcgcgtactttgtcgccgatgtccgcgagggtaccgcggacggtctggctttccggccaggtggccttgtagatcaccgcgaccggggtggtcgcggggtagccgccctccaccagccgctccgccacccggtgaatacgttgcaccgacaggtaaatcgccatcgaggtttgatggctggcaaaggcttccagctgttcgcgcgcgggaaccggcgtgcgcccttccagacgggtaataatcagactctgcgagacttcgggtaccgtgtactccacccccagctccgccgccgcgccgaggaaagcgctgacgcccggcaccacctgccagcggatcccgcggcgggtcagctcttcgccctgctcgcgcaccgagccatatagcgagacgtcgcccgtctgcagacgcaccaccgtttttcccgccttcacccccgcctccatcaggtcgaggatctgctccagatgcagcgcggcgctgtcatggcactccgcctgtggcggacagtaggccagtagctcggtgttgatcagcgacccggcgtagatcactacctgcgcctgctgtagcagacggtagcctttgagagtaatcagttcgcgatcgcctggaccggcgccgacgaaccacacgcaatggggatcaaaagtctcagccatggttttcttccttctgacaggcgatgacaaaaacgggattatggggtttgaagtagtggccgctgcccagggtagccagggtggagaccgccagctgctggcagtccacctcgtggatgccgctctgccgcaggtgcgccagagcgctatgaaggttttcctgcaaaataaaagtcatcaccagccggccgccgggatgcagctgcgccagcgaccagtcgatcagcgccgtcaggtggccgccgctgccccccataaagatcgcgtcggctttgtcggcgaccgccagcggcgcaacgcccgccacgatagcgatgttgtcgcagccaaagcgctgccggttctccgccagcaggcgcagcgcgtcggcctgacgctcaatcgccgtcacccgcagcgccgggttctgtagagcagcctcaatgctgacgctgccggtgcccgcgccgatatcaatcagatggcgcgcccggtgcagctccagcttcgccagcgccagcgcgcgcacggcctctttggtcatcggcacctgggcgccgcgcaaaaacagctcatctttcatcgaggatcaccaccgcattcatctcatattcgtcctccacggcgctgaccggcagccagtggatccgctcgttttccatcgccaggttctcgcctatcaccatccagcgatggcctttgccgcgggccatcagctgggcggctatctcccgcggtccgcagcggccgtcggtcaccatggcgactttccggtgggcggccagagcatcgaagctcaccgcccggccatggctgctggtcagccacatatcgttcatgtcgatgcccgcccgggcgcagaggtactgcaccgcgctgatgccggggatcacctgcactcgttcccggccaaaatgggcaatcagccgggtgccaatgccatagaacagcgggtcgccagaggccagcaccacgacgcggcgcccggtacgggcctcgatccacgccagcagcgccggcatatcggccctcagcgcgaagcgctcgccggcgaagtcgggaaactgctggagatgacggctgccgcccaccagcgcctcggcggcggcgattgcctcgcgcgcggccggggtcagccactgcagccccgccgggcccattcccacgaccgtcaacatgtcagctcccgggcaatcgccgccagcggacggctgctgcccagtacctggttatcaaaagaaaacagaaccgcgtcgcaggtgggcggttgttgagtgaagcgcagcatctcaagaacacgctggcagattcgctcagccagatggttatagaggcgctgatatccccaggcgtcgatatgctccattgccgcttcggtggtgtcgcactcgctgaccagcgtcagcagcggcagcggcgcgccaagcagcgccagatgagcgacgagggtttccatccgcgcatcggcgatatggctgtgggtatgaaagatcccggcggcgattttgatcagttttccgggatggccgatgagcacaatctggcggaaaccgagccggaccgcctcttcaatcatgtagccgacgaagttgctcatggtgaccaccatctgcgggtcgatgcccatctgctcgcggacaaagcgctcaccgtggttgcccggcaccagcaccacgcgctccagcccggcggcgcgttttatctccagctcgagggagagcgagcgcttccagctctcttccgacatcggggtaacgatccccgtggtgccgataatcgagatgccgccgaggatccccagccgggcgttataggttttttgcgcgcgaagcgcgccttccggggcaaaaatctccacctgcgcgccgcgggtaggacctatcgcttcgcgcacggcggtctcgatggtgtgccgcggagtgcggtttatcgccgggctgcctgtcggcaggccgatccctttgcgggtcaccgtgccgataccctccccgccctgcaggctaatctctccgctgtcattgagggtgacccgggcaaaaatcagcatgccgtgggtggcgtcgacatcatcgccgccgtctttacggatcgcggcgaccgcctgctgcccttcgacgtgcggggactcaacgttcaggcacagggtgacgccggagggggtgacgatcgagacctgatgaatcagatgctggcgcatcaccatcagcgcagccacttttgccgccgctgtggcgcaggagccggtggtgtagcccttgcgcagcgctttgccgtgatgccacaccggggcgtcaaaggtctgatcgctcattgcgcctcccgcaggtggtaaagcagagcgttcacaatcgctgccgccacgttgcttccccctttgcggccgagcgcggcgatggccggcaggccgctctcgctgagcgccgctttcgactccgcggcgccgacgaacccgaccggcacccccaccacgccgccgatggcggtctcgcgatgttccagcaggcgaaacagcgcggttggcgcattgccgaagacgaacactttctccccgggctcctgcaccgcaatatccaccgccgccatcgagcgggtcatcccccggctttgcgcctcgcgcaccacccacgggtcgctgatatagcagcggcattcgccgccaaagcgggccagcagggttttgttgatcccggacagcgccatggtggtatcggtatacagcgtgcagggccggctcaaggcctcactcagcgcgatcagggcatccggagaaaaccacagaatatccagccagtcgaagtcagcggtggtgtggatcacccgcttgataatcgcctcgtgcagcgggctggcgaaacggtagtccggtcgcgtttcggcgatgatctcgctgatgatgtcgaagcttttcgcctcgatcgcctgcggttgttggatgtactgcatcaggttctcctcaggccgcgccgaccagccagtagcgcacgccgataaacagcgccagcgccaggcttgacgccacccacattaatcgaatggttcgggaaatatcgtccaccgcgatgtcgcggacggcgtcgcctatccagggcttttcaacgcgctggccgaagtaatcgttcgggccgccaaggcggatccccagcgcgccggcgacggtcgcttccggccaggcgcagttaggactgctgtgctgatagcgatcgcgccagcccgtacgcagcgcccgggcgccatcttcccggcatagcaccgcggcaaggctgagcaacagccagctcagccgggcgggaaggaagttggctacatcatcaagacgagcgctgaccatgccgatcgcccggtatttttcgtgtttatagccgaccatggaatcgagggtgttgaccgctttataggccatggccagcggcgcgccgccgaggagcaggaaaaagagcggcgcgataatgccatccaccgtgttctccgccacggtctccaccaccgcacggttgatctgcgctggctggagctggaaggtatcgcgcccgacaatccaggagagcttatgccggctttcggcgagatctccggcctgcagcggccgggccaccgccatcgccgactgtgccagacagcgtcccgccagcgcggtgaagatcatccacacttccaccagccatccaagccaggggtggatcccgtgcgccagcgccagtacgccccaggccacgccccatgtcaggccgatcaccaccagccacatcaccccgccgccgatgcgcagcgcccggtcgctatggcagacgcgtcgcactacacgctggctgacggcgatcaggcgacctatccagcgcaccggatgcggccagtgcggcggatcgccaatgacgacatcaagtatccaggctacacaccaggcgagaagggtcatagcgccctccttgctgcccgcaaccagtggttgagcatggtgggacgctgggcaaaatggacatggagatagctggcaaaggcgctgccgaactgccatcctccctgccactgctggagcgtcttaccgtctcgctgtttacggcaggccagtacggcgggggtggcgggagaaaaatcggagtaatgaaattcatggccgcgcagccactcgccaggggctgccagcagcgtctgctgctgcgcctgcgcttcgcagtagccgaaccgggtcagacgcgtccccattcggctgtgtccgggaataatatccgccatcgtgtagcgctcgccgctggtgacttccagggtcgtgcccaggtacatcaggccgccgcactcggcgtagatcgccaccccgcgccggtgcgccgcgcgaagctgtgtcagcatctcgtggttagcggatagcccggccgcatgcagctccggatagccgccgccgagccagatcatctggcaggccggcagctggcgatcgcgtagtgggctaaagcgcaccatcttcacgccgcagcgcgccagcagcgccaggttatcggggtaataaaaattgaaggcctcatcgtcggcgagggccagcgtcagtccttcgccggcatcggcggcaagctgttctccccactcgccgatcggcatggcggccagttcgctgagggccagcagccggtctatgtcgagggtgcgccccagcaggctggcaaaatcccgccatgcctgctgattgaccaccgactcgcgggcggtcaccagtcccagatgtcgttcgggcagcgccacgccttccacgcgcggcacatagccgagcactggcacctgacagtagcgctcaatggcgcttttcagcagctggaagtgcgcgtcgctgttgacccgattgacgataacgccagcgatgtcgagagccggatcaaaatgttgaaaacccatcaccgtggcggcgatggaggtcgacaccgctttgccatccaccagcaaaatcaccgggcagccaagctgcttagccattgccgcgctgctgcagtagttggggtcggtgccgtagccgtcatacaggcccatcaccccttcgataaccgcgatgtcggcctgctgtagctgttcggtaaacagcgcgttgagtatcggggcgggaagcataaagctgtcgagattgcgggaagcgatgccgctgatggcggtgtgccaggcggtatccaggtagtcaggccctactttacagggttgcacccgcataccgcgctgttggagcaagctgagcaggccgagcgtaacggtggttttgccacaaccgctgccggtacccgcaagaatgaacgcacgcctggttgccataccctgtcctgttctggcgggcagggtatagctacgcgcatgcctggtcctgcgaccacgcaccgctaagccacccacttcccaccgaagttgttggtcagttaccggcaggcaggtcttctggcttagcctcgttctcgcccgcccttcccaatctttcgatcagtggtttttgcggggtcgtcagcatcacagcagcgggggctgcgggggatttacacccccttccctgacaccaaactggtgtcgaacctgtcggtttgtttcgccgatgcgccctgcatcgacgggtattactttatgttttcttttaccgtttcatcactcgtcacaatgacgtcagtgaaggaaagcggtgttgtgataatcagctgtctcgtattaacggacactctatctcatcacaaaaataaaaactggtgtagtttatccctcgaatatcactattttgttgcgctatgacaatttattgctctactgtcgtttttttcattttatattgatgaagatactcggggatatcaaaaatcggcaatagcaaaatattgtcatttaaaaagactcagtttgtgatccggcattaatttgctgacgaaatgcctgcggcgttacctgataggtctggcgaaacactttgcaaaaatagctggtttgcgaaaaacctaaattccgcgcgatgctggcgatgctccagtcgctgtggcatagcagctcttttgcgctcgccatccgctgctgattgacccaggcgttaaaaccgatcccctgatactttttaaacagtttgctgaagtagtacgggctgagatagacatgcgccgccacatcctccagacgcagctcatcggagagatgcgcgtcgatatagcgcagcgccttcttcattttgccatcgtgcggcgagggcgcccggctggcctgcgccgggtcgttctgcgacgggttatctttgataaccacaaagttgagctgttttttcaggcaattctcgacgatcagcttcagcagatccgccgaagcgataacccgcgaatagtccatctccggcacatcgcgaaacgcctggaccagcgccggatcgtcctgccagcggtcatcgacgttcaagatatcaaccagttcaacatcattgctcagacgcacctgcccgcacagcacgaagccgaccaggtggccggcgatcaccagcgggatggaaaaatcggttaaccccgcatgacagcggtagatacacagctggtcttttttcgaggcttccagcccgccgcagcggtcgctcatgcgacagcgtccgctgtgctccgggtgctgacgcatcagctggcaaaacggcgtgaaattaaacaattcagaaatctcatcaccgtgaatattgacgaccacaaccgccagactggtggcttgcgcaaaatcctgtgcgattttattgatgagttctgagtttagggtactcgcagaaatcatgataaaacccctcagttaattttttgttataaataaaacatatttttcatatttaccttttttagcatcagatcccatcgacgataaaaaagtgcattgacaataacaaaagtctcccaacccggggagactttttgagcggttcgtgatatcggttcatgaaattagcctggctatttcacagatacattccccttatgacgctaacgcgtattttcttcctccacgcaggtatgacagggcagattattggcgataagaaaacgataaattgcggcgccgaggcaggcccctaacaacggtgcgataatgggcacgataaaatagggaatatctcttcccccggtcatggcgatattgccccacccggcgaaccaggtgaacaatttcgggccaaaatcgcgtgctggattcatcgcgaagccggtaagcggcccggtcgaggcgccgatcaccgccaccagaatgccaatcaacagcggcgccagtgggcccttgggtacgccgttgccatcatcggtgagcgccatgatcatccccatcagcatcgaggtgatcaccacctccaccagcgccgcatgccagatgctgagctcaggcgccgggtaggtgctgaatatactggccagctgcaggctttccaggctgccgcgcaccatatgatgcaccgtttcaaattgcgtaaacagggtgctgtaaagtatccaggccagcacggcgccgccaaacgcgccggcgacctgagccaggatatagggcaccacttttctgcccgggaagcaggcaaacagccacagggcgacggtgaccgcggggttcagatgtccccccgaaatgccggccgtcaggtacaccgccagagaaatacccagtccccagataatacagatctcccacagccccaggctggcgccggtcagtttcagggcgctcaggcagcagataccaaaaaacagaaacagcccggtgcctaaaaactcggcgatacattgcgcgcgtaaagaaccattcattgtgacacctcgtgacgaagttcgtgtccaggccagccaaccatccgctggctcgttgggtacggcgaggcccactatagaaaccggcagcggcaaagtgttggcatcctgcggaaatcgggcggcgtaaagtcgccgaagaagaataatttattgctatttgttcgcgaatccatgcagcaatggcgggcgttcagggggtattttaatttccaactaaatgataaaaaattgcgaaagcgcagtgcttattttccaacaaatatcacatcacgcaaaatatcgcatagcaaaaacaatttaaaaaatcacctcttaaaatgtaaatacggagcgttaattgcaatataatcacatttatacaaacaataaaatcaaataaaaacaacgatataaaataaaataaatccattttatattatataaaaaccactattttttcgctctccaccatcaactcagccattctttttcgccgctccgccatatagttccctcactggcacatatcctgcgaggtctttatgcaacaagaagcattaggaatggtagaaaccaaaggcttaaccgcagccatagaggccgctgacgcaatggttaagtcggccaacgttttattagttggctatgaaaggatcggttcaggcctggtgaccgtcatcgtgcgtggcgacgtgggggcagttaaagccgccaccgacgccggtgccgccgcagcccgccacgtgggcgaagtgaaagccgtacacgtcattccccgcccccataccgatgttgaaaaaatcttaccgaaggggaatagccaatgagcagcaatgagctggttgaacagatcatggcgcaagtcatagcccgtgtagcgacgccagagcagcaggcgcttcccgataccccccatcccacaggagagacggctatggcagagaaaagctgcagcttaacggaatttgtcgggaccgccattggcgacaccctcgggctggtcatcgccaacgtggatgccgcgttgctggaggcgatgaagctcgaaaaacgctatcgctctatcggcatcctcggcgcccgcaccggcgccgggccgcacatcatggccgccgatgaagcggtcaaagccaccaacaccgaagtggtcagcattgagcttcctcgcgacaccaaaggcggcgccggccatggctcgctgattgtgctgggcgggaatgatgtttccgacgtcaaacgcgggattgaggtcgcgctgaaagagctggaccgtaccttcggcgatgtctacggcaacgaagcgggtcatattgagctgcagtataccgcgcgcgccagttatgccctggaaaaagcgttcggcgccccactgggccgcgcctgcggcattatcgtcggcgccccggcgtccgttggcgtgctgatggccgataccgcgctgaaatcagccaacgtcgaggtggtagcttacagctcaccggcccacggcaccagtttcagcaacgaagccattctggtgatttccggcgactccggcgcggtgcgccaggcggtgatctccgcccgggaaatcggcaaaaccgtactggcgacgctgggcgccgaaccgaaaaacgatcgcccctcctacatttaatacccgcgaggctgattcatgagatcgaaaagatttgaagcactggcgaaacgccctgtgaatcaggatggtttcgttaaggagtggattgaagagggctttatcgcgatggaaagccctaacgatcccaaaccttctatccgcatcgtcaacggcgcggtgaccgaactcgacggtaaaccggttgagcagttcgacctgattgaccactttatcgcgcgctacggcattaatctcgcccgggccgaagaagtgatggccatggattcggttaagctcgccaacatgctctgcgacccgaacgttaaacgcagcgacatcgtgccgctcactaccgcgatgaccccggcgaaaatcgtggaagtggtgtcgcatatgaacgtggtcgagatgatgatggcgatgcaaaaaatgcgcgcccgccgcacgccgtcccagcaggcgcatgtcactaatatcaaagataatccggtacagattgccgccgacgccgctgaaggcgcatggcgcggctttgacgaacaggagaccaccgtcgccgtggcgcgctacgcgccgttcaacgccatcgccctgctggtgggttcacaggttggccgccccggcgtcctcacccagtgttcgctggaagaagccaccgagctgaaactgggcatgctgggccacacctgctatgccgaaaccatttcggtctacggtacggaaccggtgtttaccgatggcgatgacactccatggtcgaaaggcttcctcgcctcctcctacgcctcgcgcggcctgaaaatgcgctttacctccggttccggttctgaagtacagatgggctatgccgaaggcaaatcgatgctttatctcgaagcgcgctgcatctacatcaccaaagccgccggggtgcaaggcctgcagaatggctccgtcagctgtatcggcgtgccgtccgccgtgccgtccgggatccgcgccgtactggcggaaaacctgatctgctcagcgctggatctggagtgcgcctccagcaacgatcaaacctttacccactcggatatgcggcgtaccgcgcgtctgctgatgcagttcctgccaggaaccgactttatctcctccggttactcggcggtgccgaactacgacaacatgttcgccggttccaacgaagatgccgaagacttcgatgactacaacgtgatccagcgcgacctgaaggtcgatggcggcctgcggccggtgcgtgaagaggacgtgatcgccattcgcaacaaagccgcccgcgcgctgcaggcggtatttgccggcatgggtttgccgcctattacggatgaagaggtagaagccgctacctacgcccacggttcaaaagatatgcctgagcgcaatatcgtcgaggacatcaagtttgctcaggagatcatcaacaagaaccgcaacggcctggaggtggtgaaagccctggcgaaaggcggcttccccgatgtcgcccaggacatgctcaatattcagaaagccaagctcaccggcgactacctgcatacctccgccatcattgttggcgagggccaggtgctctcggccgtgaatgacgtgaacgattatgccggtccggcaacaggctaccgcctgcaaggcgagcgctgggaagagattaaaaatatcccgggcgcgctcgatcccaatgaacttggctaaggggtgaaaaatggaaattaacgaaacgctgctgcgccagattatcgaagaggtgctgtcggagatgaaatcaggcgcagataagccggtctcctttagcgcgtctgcggcttctgtcgcctctgccgcgccggtcgccgttgcgcctgtgtccggcgacagcttcctgacggaaatcggcgaagccaaacccggcacgcagcaggatgaagtcattattgccgtcgggccagcgtttggtctggcgcaaaccgccaatatcgtcggcattccgcataaaaatattctgcgcgaagtgatcgccggcattgaggaagaaggcatcaaagcccgggtgatccgctgctttaagtcttctgacgtcgccttcgtggcagtggaaggcaaccgcctgagcggctccggcatctcgatcggtattcagtcgaaaggcaccaccgtcatccaccagcgcggcctgccgccgctttccaacctggaactcttcccgcaggcgccgctgctgacgctggaaacctaccgtcagattggcaaaaacgccgcgcgctacgccaaacgcgagtcgccgcagccggtgccgacgcttaacgatcagatggctcgtcccaaataccaggcgaagtcggccattttgcacattaaagagaccaaatacgtggtgacgggcaaaaacccgcaggaactgcgcgtggcgctttaacaaaggatatcccgatgaataccgacgcaattgaatccatggtacgcgacgtgctgagccggatgaacagcctacaggacgggataacgcccgcgccagccgcgccgacaaacgacaccgttcgccagccaaaagttagcgactacccgttagcgacccgccatccggagtgggtcaaaaccgctaccaataaaacgctcgatgacctgacgctggagaacgtattaagcgatcgcgttacggcgcaggacatgcgcatcactccggaaacgctgcgtatgcaggcggcgatcgcccaggatgccggacgcgatcggctggcgatgaactttgagcgggccgcagagctcaccgcggttcccgacgaccgaatccttgagatctacaacgccctgcgcccataccgttccacccaggcggagctactggcgatcgctgatgacctcgagcatcgctaccaggcacgactctgtgccgcctttgttcgggaagcggccgggctgtacatcgagcgtaagaaactcaaaggcgacgattaacaggggggtaagcatgcgctatatcgctggcattgatattggcaactcctcgacagaagtcgccctggcgacggtcgatgacgcaggtgtgctgaacattcgccacagcgcgttggctgaaaccacgggtataaaaggcacattacgaaatgtgttcggtatccaggaggcgctaacgcaggcggcaaaagcggccggcattcagctcagcgatatttcgcttattcgcattaacgaagccacgccggtcattggcgatgtggcgatggaaaccatcacggaaaccatcatcaccgagtccaccatgatcggccataacccgaagacacccggcggcgtcggactgggggtcggcatcaccatcacaccagaggcgctgctgtcctgctccgcggacactccctatattctggtggtctcctcggcctttgactttgccgatgtcgccgcgatggtcaatgcggcaacggcagcgggctatcagataaccggcattattttgcagcaggatgacggcgtgctggtcaataaccggctacagcaaccgctaccggtgatcgacgaagttcagcatatcgaccggattccacttggcatgctggcggccgtcgaggtcgctttacccggtaagatcatcgaaacgctctccaacccttacggtattgcgaccgttttcgatctcaacgccgaggagaccaaaaatatcgtgccaatggcgcgggcgctgattggcaaccgctcggccgtggtggtgaaaaccccctccggcgacgtcaaggcccgcgctattccggcaggtaatctgctgctcatcgctcaggggcgcagcgtacaggttgatgtggccgccggggcggaagccatcatgaaagcggttgacggctgcggcaaactggacaacgtcgcgggagaagcgggcaccaatatcggcggcatgcttgagcacgtgcgccagaccatggcggagcttaccaataagccagctcaggagatccgcattcaggatctgctggccgttgatacggcggtgccagtcagcgtgaccggcggtcttgcgggagagttctcgctggagcaggcggtgggtatcgcctcgatggtcaagtcggatcgcctgcagatggccctcatcgcccgtgaaattgagcacaaactgcagattgcggttcaggtgggcggcgccgaagcggaggcggccattcttggggcgctcaccactcccggcaccacgcgcccgctggcgatcctcgatctgggcgccgggtcgaccgacgcctccattatcaatgcgcagggagagatcagcgccactcacctggccggcgccggcgatatggtcacgatgatcatcgcccgcgagctggggcttgaggaccgctacctggcggaagagatcaaaaaatatccgctggctaaagtcgaaagcctgtttcatctgcgtcatgaagacggcagcgtccagttttttccgtcggccttaccaccgacggtatttgcccgcgtctgcgtggtgaaaccggatgaactggttcccctgcccggcgatctgccgctggagaaagtgcgcgccattcgccgtagcgccaaatcacgcgtctttatcaccaacgccctgcgagcgttacgccaggtgagccctaccggcaacattcgcgacatcccgttcgtggagctggtgggcggctcgtccctcgatttcgagatcccccagctggtcaccgacgcgctggcgcactaccggctggttgccgggcgcggcaacatccgcggctgtgaaggcccacgcaatgcggtcgccagcggattactcctttcctggcaaaaaggaggcacacatggagagtagcgtagtcgcccccgccatcgtcattgccgtcactgacgaatgcagcgaacagtggcgcgatgtcctgctgggcattgaagaggaaggcattccttttgttctgcagccgcagaccggcggcgatcttatccatcacgcctggcaggcggcgcagcgttcgccgctgcaggtaggcatcgcctgcgaccgggaacggctcatcgtgcactacaaaaatttacccgcatcaactccgttgttttcgctgatgtatcaccagaacaggctggcccggcgaaacactggcaacaatgcggctcgtctcgtcaaagggatcccatttcgggatcgccatgcttaatccacaggagaacgcagtatgaataacgcactaggactggttgaaacgaaaggcctggttggcgccattgaagccgctgatgcaatggtgaaatccgccaacgtgcagttgattggttacgaaaaaattggctccgggctgattaccgtgatggtccgcggagacgtcggcgcggtcaaagccgccgttgacgccggcagcgcggcggccagcgtggtcggcgaggtcaagtccagccatgtgatcccgcgcccgcatagcgatgttgaggccattctgccgaaatccgtctgaccctcaaaaaaggagcacagcgtgaagcaatcactgggattacttgaggtcagcggtctggccctggccatcacctgcgccgacgctatggcgaaagcggccgccatcacgctgctcgccctggaaaagaccaacggttccggctggatggtggtgaagatcgccggtgatgtggcctctgtccaggcggcggtgatgaccggggccgaactcgccgaacggcagcaggggctggtagcgcagaaggttatcgccaggcccggggaaggcctgctgccggcccgcgtccaggcgccttcaccagcgcctgacgtcgccgtgacggaggagaacacggccctcacagacgccccctcccactctacggagcgggtgacctgcaacctgtgcctggacccacactgcccacgacaaaaaggcgatccccgctcgcagtgcctgcacgccggtaaacgaggtgacgcgtaatggataaacaacagttggcttcgacagtcaacaaagtgctggatgagatgcgccagcgtcccattccaatcggtatctccagtcgccatatccatttagcggcggctgactatgccaggctttttcccgcgcagcccatccagccgaaaaaagcgctgctgcagccgggacaatatgctgcagagcagacggtgaccctggttggccccaaagggcgattaaacaacgtgcgcctgctcggccctttgcgccagaccagccaggtggaaatctcacgcaccgacgcccggatcctcggtatcgccgcgccgctgcgcatgtccggcaatctgcagggcacgccggggatccgcctgataagcccctttgccgaactggagttgagcggcgggacgattgttgcccagcgacatattcatatgtcgccacttgatgcgttgatcctgcgcgtctcccatggcgatagcgtcgcggtggcgatcgaaggcagcgacaggcggcttatcttcgacaacgtggcggtccgcgttgccccggatatgcgtcttgagatgcacatcgatactgacgaggccaatgcggcaggcgctgacgctgcgcaagcctgggcaacgctggtgacgaagccatgaaccacgcgatgctgcagcgtatcgtcgaagaggtcgccgcccgtctgcgccatcgcgccctcagcacggccacgctcagcgtggcccagctcggcgaagcggatatccgcagcctgctgtgccagcacgcttcgctgcgcatcgtgcaggtggatttaccgctgctggagcagcttgccggccagcgtgcgctggcggcagccggttgcgcactgcatgaggcgatggcctggggcgttcgggtacagctaacgctgcttcccgccctgctccccgcgctggcggtaaaaaaactcgcccgcttgccgctgacgttcagcgatccgcttggccagcccgtcaggcttcacgccgcgtcggtgctcacctatgccgacgtagcccgtttcagtggcggctatctggtgctgcgccgccgtcccattatcaccgccctcgcccgcgaagcggccgtcgcgcggcatgttcaattgattaagcaggagtgaactatgcatctggcacgcgtgaccggcgccgtcgtctcgacgcaaaaatcgccctctctgaacggcaaaaaactgctgctggtgcgccgggtaagcgcggacgacgatcgtccgattctccccacgagcggcgatgaagtggcggtagattcggttggcgctggcgtcggcgagctggtgctgctctgcagcggctcgagcgcacgccacgttttcagcggcccgaatgaggccatcgatcttgccgtcgtgggcattgttgactcactttcacgctaagggggcgcctgtggctatctatacccgaaccggcgatgccggcagtacatcactctttaccggccagcgggtcagcaagacgcatccgcgcgtcgaagcctacggcaccctggatgaactgaacgccatgctgagcctgtgcgtctgcgccgtcgctgaagaggaacagcgcaccctgctcgaagccctgcagcagcacattttttggttcagcgcggagctcgccagcgacagcgaacagccatcaccgggtaagcgctatatcagcagcgaagagattgccctgctggagcagaccatcgatcgcgagatggcccgcgtgccggcgctgcaccagtttgtattgcccggacgctgtgaagccgccagccgtctgcacctggcccgcaccgttgccagacgggcggagcgccggctggtcgagctggcggcagaggttactatccgtcagatactgctgcgttatctgaaccgcttatctgactgcctgtatgccctggcgcgcagcgaggatcatgccgctcaccagcgccgccttgtgacggagatcgcggcccgctatctggccgccagcgggtcgcctgcgcccgacgcgcccaaagcccaggccgggtcgctctccttttacgagctgcatcagctcatccgtcaggccattgaacacgcccgccagctgcaggtgccggtggtggtcagcatcgttgacgcacacggcaccgaaaccgtgacctggcgaatgcccgatgcgctgctggtcagcagcgagctggcgccgaaaaaagcctggaccgccgtcgccatgaaaaccgccacccacgagctcgcgacgaccgtacagccaggcgctgcgctgtacggtctggagagccatctgcagggcaaagtcgtcacctttggcggcggatatccgctgtggcgcgatggccagctaatagccggcatcggcattagcggcggcagcgtcgagcaggatatggctattgcacaggctgccatggcggccattaacgtgagaactcatcaatgaatacagcagaactggaaacccttatccgcaccatcctcagtgaaaagctcgcgccgacgccccctgcccctcagcaagagcagggcattttctgcgatgtcggcagcgccatcgacgccgctcatcaggcttttctccgctatcagcagtgtccgctaaaaacccgcagcgccattatcagcgccctgcgggagacgctggcccccgagctggcgacgttggcggaagagagcgccacggaaaccggcataggcaacaaagaagataaatatctgaaaaataaagccgctcttgaaaacacgccgggcatagaggatctcactaccagcgccctcaccggcgatggcgggatggtgctgtttgagtactcgccgttcggggttattggcgccgtggcgcccagcaccaacccaacggaaaccattatcaacaacagtatcagcatgctggcggcgggtaacagcgtctatttcagcccccatcccggcgcgaaaaaggtctcgttgaagcttatcgccaggatcgaagagatcgcctaccgctgcagcgggatccgtaacctggtggtgaccgttgccgagccgacctttgaagccacccagcaaatgatgtcccacccgctgattgccgttctggctatcaccggtggccctggcattgtggcgatgggcatgaaaagcggtaaaaaagtgatcggcgctggcgccggcaatccgccgtgcatcgttgatgaaaccgccgatctcgtcaaagccgccgaagatatcatcagcggcgccgccttcgattacaacctgccctgtatcgccgaaaaaagcctgatcgtcgtcgcctccgtcgctgaccgcctgatccagcagatgcaggattttgacgcgctgctgttgagccgacaggaggccgataccctgcgtgccgtctgcctgcccgacggcgcggcgaataaaaaactggtcggtaaaagcccggctgcgctgctggcggcggcgggtctcgccgttccgcctcgccctcctcgcctgctgatagccgaggtggaggcgaacgacccctgggtgacctgcgagcagctgatgccggtgctgccgatcgtcagggtcgccgactttgacagcgccctggcgctggccctgcgcgttgaggagggtctgcaccacaccgccattatgcactcgcagaatgtctcgcggctcaatctggcggcacgcacgctgcagacctccatttttgtcaaaaatggcccgtcttacgcgggaatcggcgtcggcggcgaagggtttaccaccttcaccatcgccacgccaaccggagaaggcaccacctccgcgcggacgttcgcccgcctgcggcgctgcgtgttgaccaacggtttttccattcgctaaccgggggcgccatgcataccttttctctgcaaacgcgcctctacagcggcccgggcagcctggccgcgctgcagcgctttagccatcagcacatctggatcgtctgcgacggcttcctggcgcgctcgccgctgcttgaccgactgcgcgccgcgctgcccgccagcaaccgcgtcagcgtgttcagcgatattacgccggatccgaccattcacaccgtggcgaaagggatagcgcagatgcaggccctgcgtccgcaggtggtgatcggcttcggcggcggctcggcgatggatgccgccaaggctatcgtctggttcagccagcagggcggtctgcctgtcgacacctgcgtggcgatccccaccaccagcggtaccggttcggaagtgaccagcgcctgcgtcatcagcgacccggaaaaagggatcaaatacccgctgttccatgaggcgctctgtcccgacatggcgatcatcgacccgacgctggtggttagcgtaccgcccaccatcacagcccataccgggctggacgcgctgacccacgccctggaggcatgggtctcgccgcaggccaccgattttaccgatgcgctggcggaaaaggccgtaaggctggtgtttcgcgccctgcccgttgcgattcgtcagggcgactgcattgcgacccgcagcaaaatgcacaatgcatcaaccctcgccggtatggcctttagccaggctggccttgggctcaatcatgcgatcgcccatcagcttggcggccagtttcacctcccccatggcctggccaatgcgctgctgctgaccgcggtgatccgcttcaatgccggcgagccgcgagcggctaagcgctatgcgcgcctggccagggcctgccgcttctgcccgcccgaagctggcgaacaggaggctttccaggcgctgcttaccgcggtggaaacgctgaaacagcagtgcgccattcccaccctcaagggcgcgctgcaggaaaagtatccccttttcttatcgcgaattcccgccatggtgccggccacgctggccgacgccaccctgcgcaccaacccgcgtccggtcgatggcgcggccatcgcgcaactgctggagaacctgcaatgagtgaagcgatagtgccactatcaagcattgatgcagcggagatccgcgaacgcgttcgggccgctggcgtcgtaggagccggtggcgcaggctttccgacccacatcaaactgcaggcccgggtggacaccgtgctggtgaacgccgccgaatgcgaaccgatgctgaaggttgaccaacagctgatggctcagcaggctgaccgactgattcgcggcctgggttacgcgatgaccgccactggcgcccgggaagggatcattgccctgaaggcgaaatatgctccggcgattgcggcattaaccccacgactcccggaatgggcccggctgcatattctgcctgacgtctatccggccggggatgaggtgctcactatctggctggcgacgggacgccgcgtaccacctgccgcgctgccggtcagcgtcggcgtggtggtcaataacgtgcagacggtgctcaatatcgccagagccgtggaacagggctatccggtaactcgccggacgttgaccgtcaatggcgccgtcgcccgtccgctgacgctggccgtaccactgggtatatcgctgcgcgaggtgctggatctggccggcggcgcgacggttgacgatccggggtttatcaacggcggtccgatgatgggctcgcttattacctccctcgagacaccggtcaccaaaaccaccggcggcctgctggtgctcccgggcaaccatccattgatccagcgacggcggcaggatgaacgaacgctgctcgccatcgcccgcaccgtctgtgaacagtgccgtttatgcacagatttatgcccccggcacctgatcggccatgagctttcccctcatctgctggtgcgggcagtgaactatcgccaggcggccaccccgtcgctgctgctcagcgccctgacctgttcggagtgcaacgtttgcgagagcgtcgcctgcccggtgggtatttcccccatgcgcatcaaccgtctgctgaaacgtgagctgagggcgaaaaacctgcgctacgacggaccgctgcgtccggcggacgagatggcgaagcaccgcctggtgccggtcaagcggctcatcagcaaactgggacttgatccctggtatcaggaagcgccgctgagggcggtggaaccggaggtggcctgcgtcaccctgcccctgcgccagcatatcggcatcagcgccgtgccctgcgtcgcgccgggagagcgggtaacgcgcggccaggtgctggcggatatccccaccgacgccctcggcgcgccggtgcacgccagtattgacggcctggtctccgccatcacggagcaggccattacgcttgtaagaggttaatcatgacccaggctatcggaattttagaactgaccagcatcgccagggggatggagctgggcgacgtcatgctgaaaagcgcgaacgtacagctcctgctctgcagaaccctttgccccgggaaattcctgctgatgctcggcggcgacgtcggcgccgtgcagcaggcaatcgccgccggcaccgcgcgcgccggggagatgctggtggacagcctggtgctggccaacattcaccccagcgtactaccggcgatcagcggtctcaacgtggtcgggcagcggcaggcggcggggatcgtcgaaacctggagcgtggcggcgtgcatcagcgccgccgaccgcgcggtgaaagcggccaacgtcaccctggtgcgggtccatatggcgtttggtatcggcggcaaatgctacatggtggtggcgggtgatatcgccgatgtcgacaacgccgtcacggtggccagcgacagcgcaggcgagaaaggattactggttcaccgggcagtgatcccgcgaccgcacgatgcgctgtggcaacagctgatggagggataatggaaccgcaaacccctaccgaacgcatgatccaggagtatgtcccgggcaaacaggttactctggcgcatctcattgccaatcctggcaaagatctgttcaaaaagctgggtctgccggacgcggtctccgccatcggcattcttaccattacccccagtgaagcatcgattatcgcctgcgacatcgctaccaagtccggcgcggtggagatcggttttctcgatcgcttcaccggcgcggtggtgttgaccggcgatgtctccgccgtggagtacgcgctcaggcaggtcacccgcaccctcggtgagctgatgcgcttcaccgcctgcccaattacccggacctgagcccatgaaacgcctgatgcttatcggacccagccagtgcggcaaaacttcgctgacccaggtattgcgcggcgaaaccctgcgctatcagaaaacccaggccatcgtctggacgccggccaccatcgatacccccggggaatatctggaaaatcgctgcctgtacagcgcgctgttaaccagcgcctgcgaggccgatgtcatcgcgctggtactgaatgccgatgcgccctggtcacccttttctccggggtttaccgccccgatgaaccgcccggttatcggggtgatcaccaaagccgatttagccgccccgccccgtctgcaacaggtccggacatggctcgaggcggcgggcgccggacatatttttatcaccagcgcgttaaccggcgacgggcttgatgacctgttcgcctgcctgaatgcagaggaatatcaatgacctataaaatcatggcgattaacgccggcagctcctccctgaagtttcagctgcttaacatgccgcagggggcgttgctctgtcaggggttgatcgaacgtatcggcctgcccgaggcccgcttcacgctgaaaacgtcggcacagaaatggcaggagacgctgcccatcgccgatcaccatgaggcagtgaccctgctgctggaggcgctgaccggccgcgggatcctcagcagcctgcaggagatcgacggcgttggccaccgcgtcgcccacggcggcgaacgcttcaaagacgccgcgctggtctgcgacgataccctgcgggagatcgagcgcctggcggagctggcgccgttgcataacccggtcaatgcgctgggcatacgtctctttcgccagctgttacccgcggtaccggcggtggcggtttttgataccgcctttcaccagaccctggcgccggaggcctggctctatcccctcccctggcgttattacgccgagctgggcattcgccgctacggttttcacggtaccagccatcactatgtcagcagcgcgctggcggaaaagctgggcgtaccgctgagcgccctgcgggtagtaagctgccatctgggcaatggctgtagcgtctgcgccatcaaaggcgggcaatcggtgaatacctcaatgggctttactccccagtccggggtgatgatgggcacccgcagcggcgatatcgacccgtcgattcttccctggctggtggagaaagaagggaaatccgcccagcagctcagccagctgctgaataatgaatccgggctgctgggcgtctccggcgtgtcctctgattaccgcgacgtcgaacaggcagccgacgccggcaacgaacgggcggctctggcgctgtcgctgtttgccgaacgcattcgcgcgactatcggcagctatatcatgcagatgggaggtctggacgcgctgatctttaccggcggcataggcgagaattccgcccgggcgcgggcggcgatctgccgcaatttgcattttctcggcctcgcgctggacgacgagaaaaaccagcggagcgcgacctttattcaggcggataatgcgctggtcaaagtggcggtgatcaacaccaatgaagagcttatgattgcccgcgacgtcatgcgtcttgcattgccgcaggcgcgcgagctggcggtgtcggcataaacgacgcgcctcctcttgcggagaatcatggtaaccggcgggtcgccatgccactatgcgccctggcgaaggtaagcggaaaggtgaaaacgtggctgttgcacaatgtcccgcctcgtgcggagaacttatccagggctggatcctcggcagcgaaaagctggtctcctgtccggtggactggtacagcaccgtcgaggtcgagaccggagtaccgcgaaaagacgagcggccgctgtcgcgggcgatggtcgaccagctgctggcccactggggctaccccccagcgctgagccagcagatccgcatcaccctgcactcaacgatcccagtggccaaagggatggccagcagcaccgccgatatcgctgccaccgccgtcgccaccgcccatcatctgggccatctactggatgagccgacgctggcgcgcctgtgcgtcgcgctggagcctaccgacagcaccctgtttcgccagctgacgctgttcgaccataataccgccgccacgcaaatcgcctgtccccctccgccggcgctcgacctgttagtgctggagagcccgctgacactgcgcaccaccgactatcaccagctgccgcgcgagccgggcctgttggcaaacgcctcccggctgcagctggcgtgggagaaagttcaacaggcctgccactgcggcagcccgcagctgctgggcgaagcagcaaccatcagcgccattgccagccagcagctgttgcctaagccggggtttgacgcgctgctggacctggtggaaagcgcagggctctatggtctcaacgtggcgcacagcggcagcgtcgtcggcctgctgctggaccgccgtcggcatgacgtcgaatttctgcaatggcggctggcagacagcgacatcgccgcccactggccgcagcagcatctgctggcgatggtgcccgggggcgtcatcctgcagtaggcctcaggccagcacccggcgcaacgccgccagcagctggtcgttttcctcggcgctgcggatcgccacgcggaaatagcggctatccagccccgggtagttggcgcagctgcggatcagcacatgctggcgcagcagggcatattgcaggtcaaaatcggctctgtcgcagcgcaagaacaggtagttagcacgcccgggccacacggtcagcccggccatctcctgcagctgcgcatagaaacgcgctccctcctcctgcagccactgccaggtggcccgctgatacgcccgatcctggagaataatttccccggccagggcggcataggcgttgatggaccacggcatttgtcgcgcgcgcagtcgggccaccgcctgggcatcagcgttcagcaggtagccgagacgcagccccggaatggcataaaatttggtcagcgatcgcagaacccagacgtgcggatgctgcgccagcagaggaataaaccccggctggtcggggataaagtcgaggaaggcctcatcgaggatcaggctgatgttcagcgcccggcagcgctgcgcaatggcttccagcaggccccgctccggcagcaggccggtggggttgttcggggtgcagagaaacaggcagtccagcgccggagtcagggcatcgaggatcgcgtcggtcagctgccagccatcgcgctcccgcagggcatactccaccacctcgcagtccaccgtctgcagcgcccgccggtactccgcgaaaccgggaatgacgatcatcgcccgccgcggcttaaggccgtggacgagggtgaagatcgattcagtttcgccgttgccggcgaggatatgcgccgccggcaactgatggtgggcagccagcgcctgatgcagctgttgatactcgacgtcagggtagcgttcggcgcagcctgggttgtcaacgatcgcctgcctgagcgaggcgggcatccccagcggattaatgttggcgctaaaatccagcagctcgccgggcgcaatgcccagcagggcggcggcctcgcgggtgttaccgccatgggcgcttttcagtaaggccatgtccctttcctgtgtggttatccgcggcgggccagcgtcgcgccatcggcaaagtaggctttaatcccggcgaggatcgactcggccacctcctgctggaatttggccgttttcagctttcgctcttcttccacgttactgataaacgccgtctccaccagaatggaggggatgtcaggcgccttcagcaccgcaaagcccgcctgttctacccggttcttgtgcaggttattgatattgcccattttctccagcaccgccttgccaaatttgaggctgtcagcgatggtgagagactgcaccatatcgaacatggtgtggtcgacatagcggtcgccgctcttgctgaccccaccgatcagatccgaggcgttctgcgtctgggcgagatattttgccgcggtactggtggcccccttggtggagagggcaaacaccgaagagccgctgggctggcggctggtaaaggcatcggcgtgaatcgacacgaacaggtcggcgcgctgcttctgcgccttggcgacacgcactttcaacgggatgaacacgtcttcgttgcgggtcatataggccttcatattgccttctttgtcgatcagcgcccgcaggcgacgggcaatctgcagcaccacgtctttttcgcgggtgcgatactttcccacggcgccggagtcttcgccgccgtgtccgggatcgagcatgatgacaatcggccggtcgcgcccggctttgcccggctgcggcccgctttgcgccggcggcacctgccgctccagatcgcctttgttgtaatcctcgagcagcgccagcagcggatcctgaacatcggtagcgttggcggggtagagatccatcaccagacgctctttaaagccggccaccggcgcgagggcaaacagctgcggcttaacgttctgcttgagttcgaagaccatgcgcacggtttgcggatcaaactggcccacccgggcggacttaataaagggatcgtcagcgcggatctgccccccatgcccttcagtaccgagttcaggttaaccccctccagatcgaccactacccgttccggattactgagggcaaactgccggtatttcagcacatgattcgattccaccgtgacgcgggtgtaggtcgatgctggccagacgcgaacagcgaccacccgcgcggcggcggccagcccgacagggctcacgctcattaaccacatggcgcccgccccctgcaataaacggcgacggcttaatccagagttgtttcccgacatgccactcccaagcaataaaaacgcatttatacccaaaacaaacagattgaccagaaactttaacgaaaggcatataacctgtcatctataaaagggtaaacattcattgacaccctgcgccgggtcacatgtttttcgcggcttagcctcaaattggggcttgcgtttaacggcaaaacagaataaaaatacaataattacgaataatcatgcattgagggtttgtcatggtgaaggaacgtcgcactgaactggtagaaggattccgccattctgttccctatattaatgcccatcggggaaaaacgtttgtcatcatgctgggcggcgaagccattgagcatgaaaatttctcaaatattgtcaatgacataggattattgcatagcctgggcattcgcctggtggtggtctatggcgcccgcccgcagattgacgctaacctcgccgagcaccatcacgagccggtctatcacaagcagacgcgagtgactgacgccaaaacgctggagctggttaagcaggcggcggggatgctgcagctggagatcaccgcccgtctgtcgatgagcctcaacaacaccccgctgcagggggcccatatcaacgttgtcagcggcaactttatcattgcccagccgctgggcgtcgatgacggcgtcgattattgccacagcggacgcattcgccgcattgacgaagaggcgattcatcgtcagctcgacagcggcgccattgtcctgatggggccggtcgcggtgtcggtcaccggcgagagctttaacctgacttcggaagagatagctacccagctggccatcaagctgaaggcggagaaaatgatcggcttctgttcgtcgcaaggggtttacaaccaggccggggaaattgtctccgaactgttccctaatgaggcgcaagcccgcgtcgaagagctggaagcagacgaagactataactccggcaccgtgcgcttcctgcgcggggcggtgaaggcctgccgcagcggcgtacggcgctgccacctgatcagctatcaggaaaatggcgcgctgctgcaggagctgttttcacgcgacggcatcggcacccagatcgtcatggagagcgcggagcagatccgtcgggcgaccatcaatgatatcggcggtattcttgagctgataagcccgctcgagcagcagggcattctggtacgccgttcccgcgaacagctggagatggagatcgacaaattcaccattattcagcgcgataacaccaccatcgcctgcgccgccctctatcctttcccggaagagaagatcggcgaaatggcctgcgtggcggtgcatccggattaccggagctcgtcgcggggagaggtgctgctggagcgtattgccgctcaggccaggcagatgggactgagcaagctgttcgtgttaaccacccgcagcatccactggttccaggagcgcggcttcacgccggtggatatcgacctgctgccggagagtaaaaagcagatgtataactatcagcgccggtcgaaggtgctgatggccgacctcgcttaagcccttctcctctctatctaacggcccgggatagcgcgacgcttatcgctttatccccggccggtctcccgcccctcttcccgccagcctggcgtacgcacgcgggcgaaattcctggtttccgcgcaggccatttctttctcgctggctcaccgatatgctattggctgtcgacaggacgtcgactggcgccgcggccgccacccgcccagcaaggatcgcttaaagaatggaaaccaaaccgaactggctggtcagacatattaatctcattaccaccgcggtcgccctctatccgtggttgctgatgatactgctcctctgggataaccagcgccatcatcagcatggctatgccgcgctcggcgccgccatcgcgatattatttctgctggccctgacgtccggcatgaatcttctcatctcctcgctggtgattttttgtgcccgctgttccaccccaccgctggccggcggcgcagcagtccgctttttcgccatgaactcgatctcggcgctctggcttatccctctgttcttcagttactgatttttccgccagcccgggcaacggctgcagcattttccatcgcccggacccggcgtctcagggggcttcgcgcccggcgaaaatctccgccaggccgctgcgccgttcggtgcgcgtcacaatggcctgggagagcacctgctcgtcggcatagagcgacaaccgccgtttcgcgcgggtgatcgccgtgtagaccagttcgcgggtcaccagcgggacgctgcgcgccggcaggatcagcgccgcgtgttcgaactccgagccctgcgatttatgcacggtcatcgcccaggcggtatcatgctccggcagacggctcggctgcaccgacttgatggcgccgtcgggcatcaggaaccacacccgcagctcgccgttgcgctccagggcgatgccgatatcgccgttaaacagccccagcgcgctgtcgttgcgcgatatcatgatcggtcggccatcataccagcgagagtggcgcggcagggcgatcgcccgctggcggttgagccgctgctccagccgctcattgacgccgctcacgccgtacggcccctcgcgcagcgcgcacagcagctggaattcgctgaaagcggccagcatggcctgcggttcggcccgctcgcggcgcagctgcaggtagcgctcatagccctgctgagccgcgccgagcatggcttcgtactcttcggtcgtgctgaggggatgaagcgcgatatcgtcaaacggctggcgcagcgtggccttcacctccgcgcgcgcgccagcgttcaccgcccgcgccaggctcccgatgccggagtgactgccgaagcgatagctcttttgcagcaggcacaaactgtctctcagcgcgcccgcgatagccccctcgcccgccggcaccggcgaaccggtcagccgggtcagctcctgcgcccgcgcggcggtatagcccgaactcgcccaggcgcagatatcccccagcaccgcccccgcttctacggaggccagctggtcgcgatcgccgaggaaaatcacccgcccgtgggccggcagcgcgtcgataagccgcgacatcatcggcaggtcgatcatcgaggcttcatccaccaccagcacgtccagatgcagcgggttgccggcgtgatagcgcatccgctggctgcctggctgggcgcccagcagacgatgcagcgtgctggcctcggtgggaatcaacgctttctgcgcgtcggtcagcggcaattttctcagcgccgcgcccagcgattcggtcagacgcgccgccgctttcccggttggcgccgccaggcgaatacgacagcgcgggctgtcttcgatctggatcagcgccgccagaagcttcgccacggtggtggtcttcccggtcccgggaccgccggagatcactgagatgcggcgggtcagcgccaccgccgcggccactttttgccagtcggtttcgccggtggcagggaacagggcattcagggttgacgccagccgggcctcatccatctccagcacccggttggcttcattgaagaagcgggcgacggtcagctcgttgcgccacatccgattcagatagagccggtcgccgcacaaaatcatcggcgccggagcatcgccgcagctcaccgccgacgaagcgagcagtagcccgggccagtcctccggcgcgccggcttcggccagcagccgatcgcggatctcccccgctttaccgctcagcgcctcgtcgccgctcaaccgcgagagcggcagacagacgtgcccctcgccggcatcccggctcagcaaggccgccgccagcttgaccgccggcgggtcgttttgcgccaccatcagggcaaactggacgtccagcggccgcagcagacgctgctccaccgccgccagcagtagttgttcgaaagtcatgaggcctcctcctgagtttctccggcaaaaagctgatccagaccgtcaatcagcggtcgcaccggccgggtggtgaagatcccctgcccccctcctgcccgtccatgccgcgcaggaaaagataaatcacgccgccgaagtggcggtcatagtcataatcggccagccggtggcgcagatagcggtgcagcgccaggctatacagctgatactgtagatcgtagcggtgggcacgcatcgcctgctccatcgccggccgggtgtaggcctcgcgatcttcccccagccagttggatttgtaatccagcaggtaataacggccttcgtgacggaagaccagatcgataaagcccttcagcatgccgcgcacctggcggaaatccagcggcggcgtgtcggcagagaggggatcgtactggcggataagcgcgtcaaggcgctccgccgtcagcagctgggcgatgggcaggtaaaatgccatctccacctgtttatcccgcgccgcaagctgattgagcgcgatatccggccccggcaggcgggtcttcagcacgccccccagccagtcggtcagcaccggcgcccactgcgcgtcaaacccgctcagctgcagcttctccgccatccacccttccggcaccggctgggtgaagtccagctcctcaaacaggctgtgcaggaaggtccccggcgcggcgccgcgcgggaactggtgcggagtcagctgcggctcttccacgacttcgccgacgccggcggcatcaacatccagacgcggcagcaaatcctgcccgccgctgaaaccatgctgctgcagtccggagtaactggtcacccgccagtcgtcggcgatgcggcgctgcagctcgcgcgccgacaatcgcgggatggtcgccgcgggcgcctgccacggggtgagatccagttcgcccggaatctgtaatgcaatatcgccatgacagaagtccgccagccgcgcagccagcccggcggcgtccatggcttcgcccgcctgcagcagccgtcccagcgcgctgaggtggaaatcgctgttgccggatttccggctgctgagcggcgccacgccgaggctgcagtgccagaccgcgcgggtcagggcgacgtacagcaggcgcagatcttccgccagtcgttccgcctccgccagctcgaggctggcctcatcctggcccagatccagcaccgccgcgaacgtctcgcgatcgtggtaaaacgcctggtcctgtttacgaaaccgggcgataaacggcagccagaccagggggtattccagcccttttgacttgtgaatggtgacaatttgcaccaggtgcttatcgctttcgagacgcatctgctggctggcggcgttgctgtccggctcggcgatatgctgcgccagccagcgcaccagggcatgctcgctttccagctggctggccgcctcctgcagcagttcgctgatgtgcagaatgtcggttaaacgccgctcgccgccgcgggtcgccagcaggttctcggcgatatgccgggctgtcatcaacgcccgcagcatcggcatcaccccgcgctgccgccaaatctggcggtattcgctgaactcttccaccagcgcgtcccacgcctgctcgtcctggttcaggttttcaatatccagcgcggtcaggccaaacatcgacgtcgccagcgcgctgcgcagggtattttcccgctccggggccagcaccgcctgcagcagccagagcagctcctgggcctcaagcgtctcaaaaacgctgtcgcggttagagaggtagactgagggaatgcccagcgtctgcagcgcttcacgcacctgcgccgcctccagccggttgcgcaccagcacggtaatatccgaagcctgtaccgggcgcgaggtttccccgcgccacagcagcgcgcgcccctgctgaccggcgctcagccagtcgcggatctgcgtggcgcagagctgcgccataaaggtctgataatcgccagacccgacagtgtcgccgggcatcagccagacgttcatcgccggtacgtccgccgcgtcaacggtaaagcgcagccccttgttcttcgccgccgccttcaccggcaggaacgggatctcgtggaacatgaaggggttatcgctgaggctgaacagccgattgacgctgcccaccatgcccggcgaggagcgccagttggtatcgagggtgtagtgcgcggcaacgtcgccgcgcgctttcatataggtaaagatatcggcgccgcgaaaggcgtagatggcctgcttcggatcgccgatcagcagcagagccgtctccggctgccggcgccagatgcggcgaaaaatccggtactgctgagggtcggtgtcctgaaattcatcgatcatcgccaccggaaaacgctggcgaatggcgctggccagcgtctcgccgctgtcgccgcgcagcgcctcgtcaagccggctgagcatatcgtcaaaccccagctcgccgcggcggcgcttttcgcgggcgaccgcatcgcggatctcgaccatcgctctcgccagcaccagatcggtgagcgtcagcgaggaggccagcaacgactctacggcgctaaacaggggatgcaccggcggttcgccaccggctttggtgcgctcgagcagaaacgactgggcaaatttctccagcgcgtcaggcagctggtagcttaacgtctcttcctgcgcccaggcgttcactttctccatccacttgccctggttgccgcgattaaacttccgccggtcaaggccggaattttccagcacgccttcgatctcgcccacctgctcgcgccactgctgcttgagcgagtcaatgcgggcgatgatctgctgatggcgttcggccagcgtctcgttaggggctggcggcgacttaagctgcggcgcttcgccctgcagccagcggtcaagggacttcagcagatcgcgcggccctttccagacgtcgtggatcaccgcagcgatatcgcgggtcaggggatagcagtggcggcgccagaaatcggcgcaggcctgatagcgcaggcgggattcatcctcgatcagctgttgctcgaacagcatgcccgactcgaaggcgttaaggctcagcatccgttggcaaaagccgtggatggtgaataccgccgcctcgtccatctgccgttcagccagcagcagcgtcttcgcggcgtcgtctttatcggcgatctccgccaacaacgcgctgtagagcggattgtcggattcgccgcgcaggcaggcgatgcgcagttcgtggatgttgctgcggatacggccgcgcagctcttcggtcgccgcctcggtaaaggtcaccaccagcagttcttcaacgctgatggcgcggggataggcggcctcaccgcccagccccaacagcagccgcagatacagcgcggcgatggtaaaggtttttccggtgcccgcagaggcttctatcaggcgctcgccgatcaggggcaagcgcaggggatccaaagactcagcggtgtcggtcattcattctctcgcatcaggggtaaggattgctgcaatgcgctgacgttttcccacactttgccgcctttcggctgggcatagtccgctttgccattctggctaccggaaatctgggacaagatcgtcatgccctgcggatccaccaccgtctgatggaagaagtcggcaagtttttgcggcgtcagcagtttaatctgagccactactttatcacgtgaatcaaaacgcatattaccgcgatcgaaatctttgctcagtttcgaggcttcatcgcccagcgtctgcggcgcctgcagcatctggcttatcaccgcctgctggagctgagcaaactcttccggcttcatcgcccgcagcttcgcctccgcggtggggaagaaggcctggaaccgctgccagaggaaggccggctgcttatcgctactctgcagcaggaagcccatgccccactggcgccccacgttcatcgggaaggcaaagaccgcgtagccgagctgctcttcagtacgcagctggttgtagaaccacggctgaatgatctgccccagcagggtgctggcggcggtgctgctgaactcatccacgttgggcggcgcaaacaccgcggccagcgcggagtcggtgctattgcccgctttgttgaagatcgccagctgctgtcggttcaccaccacgtctttattgcggcaccattcgttgccgtcggcgcccagctgctgctggatctggcgggccagggtcgtggcggcatcggcggtcatattgccgatcaccatcagttcaggacgccccctggttttcaggttggcgcggtagtcgagcacctctttaagggtaatggagggcagcagcgcccggcgcacttcgcgctggaagtacggcacctgcgagaccatctggatcggcattatcgcctgatcgtaggctttgcctttctcggcggaatccatcatctgcgcataccaggatttggcctgctccagctgctcctcggtcggcgtatagctgaagtatccctgcagcagatcgctgaacagcgccggaagatgctgggtatagccgttggcattgaccattaatccgttattagcgccggtagagaacgaaatgccgccgaccgccgcctggttactgagctggtcgagggcgatgccggcgagataatcgttgagggcaaacatcacctgccggcgagcgctgtccatcgcctggggattacgcagcaccagggagatgtccgccttcggctcgctggcaaaatactggctcggggcatacaccacccgcagcgtcggttcatcaaggatcagctgcggatgcggccaggctttatcgcttttgataagggtgaagtcatccggaatataggggttgagcgccggcagctgcagctggatggcctgcgatttgtgctgccagtcagcgaacgtctgctcgctaatcttatccacctgatacggcgcatcgacaaagtaagccgtcttgttatgcggctcctgggggctgatataccagatgcgggcgttctgcggggtcatcatcgccagccggtctttgatcgcctgcgggtcgtactggtcggcaatattcaccacgtccagcgcatgctcgaccggcacccggatcatggtgtccgccagccattccacgtagtccatgtcgcggttgatcgacggatagcggaaatcgagcgccagcacatgcgccagttcgtcgaaatagcgtttgtcgatgccctgagtacgcaggaggtcgaggtagctgaaaatggccgccgtcacttcatcgcggtgcgccaggcctttgtcggtgagggtggctgagatcgccagtacgccgctgttgccgtttaccaccggatcggaatcggcgcggataccttccgccagaccctgtttttgcaaccagtcagagagcgtgcccgggctgcggttgccgataagataggtgaccagctcatcggttttgctgcggaagcgatcgctgttgttgtcgatgcgaaactcgacgcgcagcactttacgcggcatcgccggcacatagtgaataatgatgcctttttgcgcatccgtgaccaccgggacggtaatatccggcctgctgatctgacgattcggcacgcggccaaaggtgtccgcagccatgcgcgccagcgccggcaacggcttgttgctgtagatcaccgctttcatcagattggcggagtaccagctatcgcggaaggtgtgcagcgcatcaagcaccgggctgccgggcttatcgctgagcgtctcgaggttgccgccggagaagtgggccgccgggtgagccgggttgatggtctccgcgctgacctgggccatgcgcatcccgtctcgcgtccgggccatcgtcagctcggcgttgaccgcgttacgttcgcggtcggcatattttttatccagcagcggcgcggcgatggcgtcggccaggcgatctacggccccgtccagcgcatcattttccacttcaagataaaacgcggtgcggtagggcgcggtactggcgttatggctgccgccgtgcagcttaagaaactctgcaaggctgtcaggctggggatatttttgcgaccccatcagcgtcatatgttccagaaaatgcgccagcccctgatgatctgccggatcctgcagggatcccaccggcaccaccagcgccgacagcgatttcaccgcctgcggatcggaaaccagcagcacgaccatgtcgttatcaaggcggatcgcctgatactgacgcgtatctttttcgcttttgcggatcgtctcctgaatcggctgccatccggtgtcggcctgactaaacggcgcccagagggcggccagcacaacaaaaaccttgaaccataaactgcggggcattcacgaacctcatcattaacaaacttgcgctgcacagcgtgcagccttttatgtccatcagtccgtgatacgttgcgcatattaaatgaaccgtcattcactgcgcaatttttatactatttaaatttgtgtggaccgatggtaacgatatagcggtaacagataacgctgcgtctgggcaatgatttcttcgtaatgcgccggctccagcgaacgccacaggcgttgataccagatatcggcgccctccccgctgaccaccatgttcccttcgtaggtctgcaggaatttgctccgcgctttctgctgcgtctcttcgtccattaagatgacatccttttcggcgtcgtaacaggctttcagccaggcgccaccgctttccggcagcagcagcagcggctgcgacatccccagcaaatagccatccaccagctcgttaaggtacgcctgcgcctcggcgggcgccagcgccggaaagcgccactctccctctttccgcacaaacagccggctctcgccggtgccgccgctggcgcagtagacaaggtgttccagccaaagttgcatcccctgggagacgctcagcagcgaaggccgccagcgcagcagaccgtccggctgcacctgctgcagccagccggtcaggttcacgccgccgcactgcagatcgatctccatgctctgcgcctgctggcgctcggccatcacccgctcggccagcgcctgcatctccaggcgctgcgtctcccagaccagctcgccaaaggcgccatacggcagctcgccggcggcgcgaaagcggcggaacatagccgagacgtcctgctcctcaataagcgtattgagcagttgctgattcagttgataacggctcagcccttcaagagtgaacggctcgtcgtctggaatatcgtcctcttcggcgcggaaattgacccgcaaacgctgctgaaagaacgcgcgtaccgggtgctgccagaagcgcaggagctgatcgaacggcaggctgtcaatcggcggcgcggtgagcggctgtataaaatcgctatgcgcctctccctgctggccggcggccgccagccattcacgagcgtagctcttgttctcgtcttcctggaaattggcaacgtcgaacggcatgcgcgtatgcagatgggtgatgtgggctttaacccgcgcttcgctggcgtcgcagtcaagctcttcgtcaccggcgagacagtgactctggccgatataatccaccagctcctgcaccagcaccgaaggaaaacgctcgctgttgtcctggatcgaacggccgatatagctgatatacagcgtctgctcggcggacatcagcgcttcgaggaacagatagcggtcatcatcgcgccggctgcggtcgccgcgctgcggcttctggctcattaaatcaaagcccagcggcggtagcgtgcgcggataaaccccgtcattcatccccagcaggcacaccaccttaaaggggatcgaacgcatcggcatcagggtacagatattgaccgggccggcaagaaagcgctggctgatccgctgctgatcgaggcgctgggccagctcatcgcgcagcagcgtcagcggcacctgctcgccatactgcgcctccagaccgctatcaataaccgccagccactgctgctcaatcagcgccagcgccgcttcggtctcactgtccggcaggaaaaagtcattcagcagatcgcgacagaccggcagccactccgccagcggccgctgctgggccaggccgcgtcgccacagattaagctgcatcagcagcgacgcgaggttgcccaccagctcggcgatcaaaccgctggattcgtcatacggcagcaccgactgccattctccctcgcggctgtccatcgcgtagcccaacagcatgcgggtgaggccgaaccgccaggtatgctgcccggtcgccggcaggtccagctcacggacgttgtcgtcatccattccccagcggacgccggactcgttcacccactggcgcaggtagcgcagcccttcttccgtgatattaaagcgcgccgccagcaccgggacgtccagcagcgccagcacatcttcactggcgaagcggctgtccggcagtgagagcagcgtaataaacgcctgcagcaccgggtgcgactctcgggcgcgacggtcggagatcgcccacggcagccagcgatcgccgctggcggcgccaaacaccgcctgtatataggggctgtagctgtcgatatccgccaccatgacgatgatatcccgcggcgtgagcgtcggatccgcctccagcatcgccagtagcctatcgtgcagaacctccacttcgcgctgcggactgtggcagacgtgaatgctcagactgcggtcatccagcgtcagcggacgtttgtcgcgactgtgggcgaatgcctctgcgctctgcccggccaccgccgcgttgcgtagttcaaggatatccgactgcaggttatgcaacaggttatcgggggcgatgtcgacaaaagcgtccagctcctcatagcgctccagccccgccagcaggtagatatagtcgcgccccagtttcccccaggaggcgagcaacgggttgccgacatcctgttccccggcgtcattaaacaaccccggcgcctgctcggtgtcgcgaaacaggggtagcgcgcgcgcctcgcggtgatggcgccgctggcgcgacagcagcttcgccaggaacgccggatccttaatgtctccccagtagtagcggcaggggttggtaaacaagacatagacatcgacatgcttacccagcgcctgcagcgcctgaagatagaccggcggcagcgcggaaatcccgcagatgaagacgcgcgacggcagcccggcgggcggttcgtccgctttttccagggtactgataaagcgctggtagagattggcgcggtgccactgcggctgccccagctcggcggtgtagctcaccagcgcctgccacagcggcgcctgccactgctgggcatcgccgagaccttccacccgctggccggcctcccagcgcatcagccactccgggcgatagacgaggtactggtcatagaggtccgccacccgggcggccagctgaaacagcttgcgcttgtcgccgtcatcactcagatactggcgcagcaggataaaatcgtcttcctccaggtgctgcggcaggagggtcatcagcttccagctcatgctctgcttgctgaaggcgctttcgccaggaatatctttcaggacgcgcacgaacatatcccagataaagctcgccggcagcgggaactcgatattggcggcaatcccgaagcgcacggccagggtcatctgcagccactgcgccatgccggtactctgcaccagcaccatttcggcctgaaaagggtcatccagccgctggcgctcgacgataaactccatcaacgcctcgagaacatccagccggtttgagtggtatacccttaacataattgctcctgactactggctgaccgggcaatgcagccgggtcatctgcacccgctttgcaacgggtctactgatcgttaccgtgatgctgacacatctttgcctcgatgtctgcatacggcttacctgcccgcgtgccggcgacggcggcgcggagagctggctatagcgccacgcgtcgcgccacagttgacgggtctggttcaactggacaattccttgcgccattccgcgctgatagccgcccagcgcggtgaccgtcagcaccatcagcgccatcgccagcacggtctccggcaggctaaacccccgctgacgcttcagggcatttgacataagctcgcctccctgagcgggcaaaaatcgctccagccgtgggcggaaaaacgcacctgcccgccgcgcacctcgccggactgccagacctgcacctcgccgctggcgctgctgagcaccagtgaaccgtcgccgaagatacgcagacaggcgcgccagccctgcggcgcctgctcccggcaggccagcgccacctgcgccgaccagacctgctgttttccccactgcagcgcggaatgggctatcgccgtatcgcggatcgcttgcgtttcgctggcggtttgcgccagcagcgcccgctgctgcaggttaagcccctcgagtaacaggctgccgagggtcagcaacaggagcaccatcagcagcgacgacattccacgctggcggatcacaggttataccccgtcacccgctgctcaacctcgctcgtcaggcccgtctgttgcgcggagcgcgccgccagcgtcacgctcagctccggcgcgaagcccggggtgacctgacgttgtaccgagaagcgcgtcaccacgatggcggccgggttggtgattttctcccatccgccgccgcggcagtcgctggccccgcgcagggtctccagcgcgccgtcgcgcaggcgaaagccggtgctctccgccgctgccgcgggggaggtttcccatctcccgttgctgttcgcatcccagcgcacaatcagacactcgccgccagcggctagctccagcccggctccgccgcacgctccccggcagtacccggcgcgctgcagatgttttcccacggcatgcacacgctgccacagctcgttctccagggccagctgttcgccctggcgcagaatatgacgctgcagggcaggcagaaagcggcaggcccccatcagcagcagcgagccgatggccatggcgataagcgcctccgccagggaaaatccgcggcggctcactgacaccctcctgcgctgtcgctgcggcataaacgaatccgcccccagtgtgagatcacaatgctccagctgccggccgcgctctgcagccgcagattccccgcccaggcggtgctgcgcagaccataaaaccccagaccaggcgtaacgccagccagcgtgatccccggccagcgcgggcgcagcgtgaaggatgtccccgaggcgcagtcaggcccctccccctccgcgctcaggcaccagcccacttcgtcctggccgacgcgaagcacgcggtcccggttgtaggcgttggcgtcatcgcgcagaaagagcagaaaatcccgcacctggacggcggtttgccacagtcgttgctgctgctgccagcgctgccagccgtacaggccgccgacgctgaggagcatcatcagtgtcagcgttaccagggtttccatcagggtgtagccatgttctctgttcatggcgtcgagtatgccgcggcgattggccctggcgcgacgacggaaaatagctttcccggccagatacgcaaaaaagctttgcatactcgacagaagaacatttttttgcgaacgtctacccaacttcgcccaccgcaaccacctgtggcctggggggcaggtgaaaacaaccttctcccggtggtaacggaaagcgctcccatcgggtggtgcgaagggcataaaaaaaccggcgccatcgggcgccggttagtcatctctgctggggggttaaatcgccaccggcgctttaatgcccgggtgcggatcgtaaccttcaatctcgaagtcttcaaagcggtagtcgaagatcgacgccggcttgcgtttgatgaccagcttcggcagcggacgcggttcgcggcttagctgcaggttggtctgctcaagatggttgctgtacagatgggtgtctccgccggtccagacgaaatcaccgacctgcagatcgcactgctgcgccaccatatgcaccagcagcgcgtagctggcgatattgaacggcaggccgaggaacacatcgcaggaacgctgatacagctggcaggagagcttgccgtcggcgacgtagaactggaagaaggcgtggcacggcgccagcgccattttatccagctcgccgacgttccatgccgagacgatgatccggcgggagtccgggtcgtttttcagctggttcatcaccgtgctgatctggtctatatggcggccgtccggcgcaggccaggaacgccactgtttgccgtagaccggccccaggtcgccattctcatccgcccactcgtcccagatggtgacgttgttctcatgcagataggcgatgttggtgtcgccctgcaggaaccacagcagttcatggatgatggagcgtaaatgacagcgcttggtggtcaccagcgggaagccttcctgcaggttaaaacgcatctgatggccgaaaatggagatcgtgccagtgccggtgcggtcattttttggcgtgccctcggtgagcactttctgcatcaaatcaagatactgtttcatggttcctcaagaattctgttgctgcggacggtggcggtaagcccaaaccatcataatgatacccgcaagcaccatcgggatcgaaagaatctgccccatactgatgtactgcacccagccgccggtgaactgggcgtcgggctggcggaagaattccacgatgatgcggaacaggccgtagccaatcaggaacagaccggaaacggagccggtcgggcgcggtttacggataaacaggttgaggatcaggaacagtaccacgccttccagcgccagctcgtacagctgcgacgcgtgacgcggcagcgcgccgtaggtatcgaacagcgattgccattccggatgcgtcggcagcagcgccaggtcttcggcacgggagcccgggaaaatcatcgtgtagtggaagctcgggtctacgcggccccacagctcgccgttgataaagttgcccagacgcccggcgccaagaccaaacgggatcagcggcgcgataaaatcggagacctggaagaaggtgcgtttggtgcgtctggcgaagataatcatcaccaggatcacgccgatcaggccgccgtggaacgacatgccgccgtcccagacgcggaacagatacagcggatcggcaagaaataccggcaggttgtaaaacagcacgtagccgatacggccgcccaggaagacgccgaggaagcccgcgtagagcaggttttccacttcatttttcgtccagccgctgcccggacgattcgcccgacgggtggccagccacatcgcaaagacaaagcccaccaggtacatcaaaccgtaccagtggagggagaccgggcctagagaaaaaatgaccggatcgaactccggaaaatgcaggtagccactattcatctgtcaccataaagacttgttattccgccgaaagtggacagcggtgatgatccatacccgaacaaaacgggcacgccgaaggaggcgaatcatagcataagccacaagagcgatccgcgccgaacgtgtaaaagatatgtatacggatgctaacagaatgccgttttcccggcggtaccctactttgccggagggtgcgagcagaggatccccgggttacggcttacgcctcacccgggctggcgctaccgcccgccgcggatcaggccgccgagaccgcgacgctccataaaggccgccacctgatggcgcacctcggcggtcatctgcgcatcgaggctgcgacgcgacagctcctgcgcctcttcgatatcaatgcggcgcagcagatacttcaccctcgccaccgagcggccgttcatcgacagatggcggtaaccgaggccgataaggatcgtcacgcacattgggtcgcccgccatctcgccgcacaggcgcagatcgatgccaaagcgctccgcgtcatgggcgatcatcgccagcgcccgcaataccgcaggatgcaggctgtcatacatgctggcgacccgggtattgttgcggtcgacggccagcaggtactgggtcaggtcgttcgtccctaccgagataaaatcgatccggctggccagctgcggcagcataaagaccatcgacgggacctccagcatcacccccaggcgcggacgtgggatggcgtagccgatcatctcttccacttcccggctggcgcgatcgatcagccgacgggcctcatccacctcctccagactggtcaccatcggcagcaaaatgctgaggttgccggtggcggcgttggcgcgcagcatcgcccgcacctggatcaaaaagatctccggctgatcgagggtgatgcggatcccgcgccagccgaggcacgggttctcttcgctgattggcatatacggcagctgtttatccgcgccgatgtccagggtacgcagggtcaccggtttgctgttaaacatctgcagcatgccctgatactgggcgacctgctcctcttctgaggggaagccgctctgcagcataaagggaatttcggtgcggtagaggccaatgccgtcaacaaagctgccgagcttctcttcgtgctccgggcttaagccggcgttaagcatgactttcactcgctcgccgcttttcagctccgacgcgcgctggagatcgtcctccgccaggcggctgagttcgttctcttcgctgataaggcgctgatactcctgcaacaggacaggttcaggatccaccagcagctcaccgcgatagccatcgacaatcagcgtatggccatgcagcagcgagggctgaatatcggcgcccatcaccgttgggatgccgagggcccgcaccataatagcggcatgggagttggcggcgccatcgcgcaccaccacgccggccaggcgatcctgcggcacttcggcgagggtggtggccgacagctcgtccgccacgaggataatgcgcgccggccaggtgttgggcccctgaatactgtcgtcgagatggaacagcagacgctggcccagggtacgcagatcgccggcccgctctttcaaatagccgtcgctcagcgcggcaaactgttcggcgaacttctcaatgatctttttgacggcccactcggcgacggcgcctttgtcaacttcggcaaacagctcgcgacgcaggcgggcgtcagagagcaggtgcgagtagagatcgaagatcgccgccgtctctttttgcgccccggcggcgtagcgtttgctgtagcgacgaaactcgttggccgcctcttccagcgcaccggtcaggcgttcgcgttccgaggcggtgtccagcgtcgaggcttcatacacctgctccatcagcggcaggctgacgtccatccagccctcggcgatcgccaccccggaagaggccggcagagcgcgaatgcgcgtttgacgatactggccgaacagggcgttcagctgggactgggagaggatcgccgccatctgggtggcgagggtgacgaggaaagactcttcgctttcatcaaactgacgcagctcgcgctgctggaccaccagcacgcccagcagctggcggcgctgaatgatcggcacgccaaggaaggcgcggaagcggtcctctttgacggcggggatatatttgaagctggggtgtttttgcgcatcggcgaggttgatgggttccgccaggcggccaaccagccccaccaggccttcatcgaacgccagcgcaacggtgcgcccgcgaggtttttttaacccgcgggtggccatcaggtaatagcagcgtcggtcattgtcagccaggtaaaccgagcagacttccgtctccatcgcctggcagacatccgtcaccagaatatccagcgcctcgtttaaacgcggcgcgctcgcgaccttctcgactatttctcgcaaccgagtgagcataatgtgcgtggcttaacctcttttacgtcgataagcaggcgcgttttgcggcttaggtgcgctctccgccagcgacatggtcacgctggcgaactctttcatcacccggcggtagacgtcgcgcttaaacgacaccacctggcgaaccgggtaccagtaactcacccagcgccaaccatcaaattcaggtgtactgctggtttgcatattgatgtccgcatcgttgccgatcaactgcaaaagaaaccacttttgtttctggccgatacaaaccggctttgtgtcccaacgcaccaaacgtttaggcaacttgtaacgcagccagttacgggttgaggccaggatccgcacatctttacggcttaacccgacctcttcaaacaattcccgatacatcgcctgctctgcggattctcctggattaatgcccccttgcgggaactgccacgagtgctgaccatagcgccgggcccacatcacctggccctgacgattacagattacaataccgacatttgggcggtagccatcgtcatcaatcaccggactacctcaagataagcttcaatgtgaatgattgtttcacactcgccggaaacggtaaaccactctgttcgcacactgagaacggataacatttgaataactcacagtaattgccagagttataaacaatgaaagcgcgtgacagccgattttattcactttttctgtggatagagttgtgaagaagtacggaattaacccgggaaaacccagagtaatccgaacatcgcatcgctagcatctgaaaataatagtatcatattcataaagttagaatatattcctttcacacattacagcataacgtgacgatcatcacacatgcgatctgccgactgatgaaagatcgagcaatgtcgattttatccacagattacgcgcaggccaccggcagattttctctaaaaattcgattttcgtcgcacgtcaaggctgtaaatcgaaccagtagtgagtcttttccccagttatcccacttttctgtggataacatggtgtaagatcctgtttattgtcagtgaccagttctggaaaacccgtttacaccgttttcataagccgcatgatgagtttaaaaagccatataaatcatgagattggtatagttactcagaaaacggtaaactctatccacaacgcgcaaaattagcgctcactttttaaccaaaggtattgccctatgcccgctatcgctccgctcgcctcaccgccgcaaagtcaggaacagctgttggcccaggcccgccagctggccggctattcgctgggcgagctggcggcgctggcggggatccccattccgcgcgatctgaagcgcgataaaggctggacgggcattctgctggagctgtggctgggcgccagcgcaggcagtaaacccgagcaggatttcgccgcgctggggtcgagctcaaaacgatccccatcgacagccggggacgcccgctggagaccactttcgtctgcgtcgccccgttaaccggcaatagcggcgtcacctgggagagcagccatgtacggcataagctgcagcgcgtcctgtggatcccggtggagggtgaacgcaccatcccgctggcggcgcggcgcgtcggcgcaccgctgctgtggagcccggacgaagacgaggagcgccagctgcgcatggactgggaagagctgatggatctcattgttctcggtgaggtagagcgcattaccgcccgccacggcgaggtgctgcagttaagaccgaaagccgccaacagcaaggcgctgaccgaagccatcggtgcccgcggggagacaatcctcacgctgccgcgcggtttctatctgaaaaagaattttaccgccgctctgcttgcccgccatttcttgttacaacacgattaattttttgttctgcgttgggggttgcatataattgctgctttctattttgcaggactttgaacaatgttatttgcatggataaccgatcctaacgcctggctggcgctgggcacattgacgctgctggagatcgtgctcgggatcgacaatattattttcctctctctggtcgtggctaagctccccaccgcccagcgcgcccatgcgcgccggatcggtttgatgggcgcgatggtcatgcgtctggcgctgctggcctcaatcgcctgggtcgttaagcttaccaacccgctctttaccgttttcggtcaggagatctcgtttcgcgatctgatcttgctgctcggtgggctattccttatctggaaagccagtaaagagatccatgaatctatcgaaggtgaagaggaggggctgaagaccaacgtccactccttcctcggcgccatcgtgcagatcatgctgctggatatcatctttagcctcgattcagtgatcaccgccgtcggcctgtcggatcatctgttcatcatgatggcggcagtggtgatcgcggtgggggtgatgatgttcgccgcgcgacccatcggcgattttgttgaccgtcatccttcggtgaaaatgctggcgctgtcgtttctgatcctcgtcggctttaccctgatgctggaaagcttcgacgtccatgtgccgaagggatacatctatttcgccatgttcttctctatcgcggtggagagccttaacctgctgcgtaataagaaaaacccgctgtaaaccacaaaattgcagcctggtcacaggctgcaaccctttttcagactttactgctttttatgtctcacaaatcaggctattaatagacgggtatggggtgcagctactgaagaggtgttgacgatgaagaaatgggcagtattgatttccgccgtaggactggcgttctcggtttccggttgcagcagcgattacgtcatggcgaccaaagatgggcgaatgatcctgaccgacggtaaacctaccgtggatgacgataccggtttaatcagttacgaagatcagcagggtaataaaatgcagatcaatcgtgacgacgtttcgcaaatcattaagcgttaatctttccctgtcggccccagcttctgttgacgctgcgcttaccgaccaccagtcttttgagaagagtcgggatataccaggacgccgcgggtttcacccaccgcccctcctcgtcacccggcttttttgattttttacttcctctttttctcaccctctgccatgttgatactcctttgtcggggaatgcctgaccttataaataaaaaggaagctggctatgcagtatcaccgtatcccacacagttctcttgaaatcagcaccctcgggctgggaaccatgacttttggcgaacagaatagcgaggccgatgcccaccagcagctcgattacgcggttgccaacggcatcaacctgatcgatgtcgctgaaatgtacccggtcccgccgcgcccggaaacccaggggctgactgaaacctacgtcggcaactggctggcgaaacgcggcaatcgcgaaaagctggtgctcgcctccaaagtcagcgggcccgcgcgcaataacgacagcagcattcggcccaatcacgtcctggaccgcaaaaatatccgcgaggcgctgcacgccagcctgaagcggctgcagaccgattatctcgatttatatcaggttcactggccgcagcggccaaccaactgctttggcaagctgggctatacctgggccgacgccgcgcccgccgtgacgctgctggataccctcgaagcgctgaccgagttccagcgcgccgggaagatccgctacatcggcgtgtcgaacgaaaccgccttcggcgtgatgcgttatctgcacctggcggataagcacgacctcccgcggatcgtgactattcagaatccttacagcctgctgaaccgcagctttgaagtcggcctcgcggaagtgagtcagttcgaaggcgtggagctgctggcctactcttgcctggctttcggcacactgaccggcaagtatctcaacggtgcgaagccggcgggggcgcgcaatacgctgttcagccgctttacgcgctacagcagcgagcagtcgcagaaagcggtagcggcctatgtggatatcgccaaacgccacggcctcgatccggcgcaaatggcgctggcctttgtgcgtcggcagccgtttgtcgccagcaccctgctgggggcgacgaccatgacgcagctgcaggccaacgtggaaagtttgcagcttgagctgagcgaagaggtattagcggagattgaggcggtgcatcaggtttatacctacccggcgccgtaaaaaagcaaagccccgggtagcggcgtatacgccttacccgggctaccgaagagcagatattggcgaccccctcgcccagtcaagcgcagcgtaagccgggaggttatttacgccgcccccagacccacagcgcggcgatggccacggcgaataccgcgccaaagcctatccccacggcgaccggtggaacgcccacgctcaccgccagggaatagagccccagcatcagcagcatcgccacgttctcaccgaggttctgtaccgcaatggcgttacctgccccgaccgaatgtttcccacgctcctgcagcagcgcgttcagcggtacgataaagaacccgccgaacaccccgagcagcagcagcagaccgaacgccggcagcagcgactgctgcaccgcaaaggctatcaccgcgataccgatcaaaatcccggccggcatacagcgcgacaccgtctccagggtcaccagcttcgccgccgccccggcacccagcacaatccccaccgccaccatcgcattaagataggtgggcatggcgttgctggtaatgcccagcgccaccggcacccagatcaccagcaggaaacgcaaggtcacgccagcgccccagaacaggctggtgcccatcagcgaaaagcgggtttcgccgttgcgccacagcgtccggcaggcgctgaagaagctgtgcgtcattggcttaaaacgccacgactgccccggacgcgccgccggcagcctgggtatccacaggttagccactaccgccccgccgtagaccagcgcgcagacgatcagcgccgccagcacgtgccagtcggcgaggatcccgccggccatggagcccagcaggatcgccgcgatggtcgaggactccatcagtccgttagccttcactaacttatcgccggtggtgagttcgccgagaatgccatacttggccggcgaataggcggcggcgccaatccccaccagcgtatagccgataaacggattgacgccgaagcagatgcagccggcgccgagcagtttcaggccgttggccaccatcatcacccggcctttggcaaagctatcggcgaactggccgacaaagggggcaaagaggatgtaagcgcccacaaacaacatctgcaggaccggctggctccactccggataatagagctgcttcatcagcgccagggtggcgaagagaagcgcattgtcgccgaaggccgacaggaactgggcgcagatcaccgccaccatccctttcgagtacagcgaagggttagtatgtactgactcactcatgggttgtttccgcctcgtcgaccatatttttcagggtgacatagtctggcttgccgctgccgagcaccggtagctgtttcagccagcgtatatctcgcggcaccgccagctccggtacgccgtgctggcgggcgtagcgcagcagggcttcacgagtcagttcattatcggtggtaaacagcaccaacgcctcgcctttgctggcgtcctgtttaatcgccgtggcgtgcattttgtccggcgacgcgccgagggccacctgctccaccatctcgagggagatcatctcgccggcgattttggcgaagcgcttcgcgcggccctgaatgcggacatagccctgctcgtcgaaggtaacgatatccccggtgtcataccagcccgcttccatctcgccgtgctggttttccgccgcaggcgcttccagcacgccggggttttccacccgcaggtagcctttcatgatgttcggccctttcagctgcagccgccccccttgatcaatgcctggcatcgccagcaggcgggcgtccatccccggcaggatgcggcccacggtgccgaccttcgccgccatcggcacgttaatcgagaccaccggcgcgcactcggtcacgccatagccttcgagaatgcgcaggccgaatttatcctgccacagctgtttggtgctctcctgcagcttctccgccccggcgaccacgtagcgcaggcggtagaaatcgtacggattggcgaaacgggcatagttggcgaggaaggtcgaagtgccgaacagcaccgtacagttgcgatcgtagaccagctccggcaccacgcgatagtgcagcgggctgggatagagaaacacttccgccccggtaagcagcggcgtcagcaggccgacggtgaggccaaaagagtggaacagcggcagcgccgacataaagcggtcattggcggtaaagtcggcgatagttttgatctgctcgacgttggacagcagactcttatggctgtgcaccacccctttcggattgccctcggaaccggaggtgaagaggatcatcgccgcgtcttccggctgctgcttaacctgcgccagacgcggcgccagcagatgagcaaaaatccacagtttgtcagcgagggtgatatcgcctttaagatcttccaggaatacccagcgcacctgggtcagctgctccggcaggtgccagagtttgcctttatcgaggaaggtgcgcgaggtgaaaatggtgttgagctccgcggcggctatcgcgctgctgagccctttcaccccggcggtatagttcatcatcgccggaatacgcccgcgggcgatagcgccgaaaatcaccgccgcgctgatgccggcgttaggcagcatcaggccgatcttctcgcccggctggctgtatttttccagaatgcgggcgacaaacagggttttggtcagcagcttgcgataggtatccggctggaagttgatatcctccacgcagggtttgcgcgcgccgaagcggtcctgcgccgccagcagcgactcatacagggtttcccgcgggcgcaccgccatccgggcttccatcatgatctggtgcagcatctccccggcgatcttccgccggtcgcgggcgcgcggcgcctcgggcatcggcagatgggtgggcggcaggagatgcagctgaatacgcgggaacaggcgacgtttcaccagccccttcagccggctgaagggtgtcagttcggcgccttcaatacgcagcggcacaatggtcgcctgcgatttggcggcgacaaaggcggcgccgtcataaattttcatcagcgagccgctgaccgaaattcgcccttccgggaaaataaccaccggccgcccctgctcaatcaggcgcaccagatgtttgatcgacatcggcttggtcgggtccagcggcacaaaatcgataatcggcgtcagcgcgcgcataaaccagcgctggctgattgaggtatagaccgcaaaaaccggtcggaccggcaaaaacagcgccagcagaatgccgtcgaggaaagagacgtggttcggggtgattaagaccttttgctggtataaagcctgcgtgtcgccggtcagtctgacccggtataaccccttgaacagcagtctgaaaaatcccaaaagcataacaactccatgtgaccggttgatgagtcaaagcaggttacacgagaaggcatgggaaagcagtgcagcggggggattttcggaataaaaaaaacctgcgcatccgcgcaggtcggtgtaagacgttcagtacgaagagcgtacctgagaaactcacctatcaatacctctgggatctcgattgtcacgttttttggccgtaacgggccagcgggaaaacgcaagggagtgagcctaagtgcaacgaggtattacgattttcgctatctgtaacaacgccgatagcgggcaaaaaaaaacctgcgcatctgcgcaggctggtgtaagtaaagtggtcaacgtgacgttgactccacctatcaatacctctgggatagccagaatatcaaccggatccgcgaacaaaccagcgaacattcgcaacagcgcatcgcaaagtgtaagcaaaggtttgtatttccctgcgccggtttcaattaccgatcgcgtcaatgtaaacaggtcaccgataagcccgcgctgaatcacatttgcgccattccttcgccgccgcgccttgaatctgccgctctttcccgtaacatagcagtatgtaaacgcttaccctagaaaaggcatggtatggcgactattaaggatgtagcccgactcgcaggagtctccgtcgctaccgtctcccgcgtcatcaacaactctcccaaagccagcgaagcctcgcgtcagtccgtgggcgcggcgatggaaaccctgaactatcaccccaacgcgaacgcccgggcgctggcccagcagtcaacggaaaccgtcggcctggtggtgggcgatgtctccgaccccttcttcggcgcgatggtcaaagccgtcgaacaggtggcctaccgcaccggcaattttttgctgattggcaatggctaccacaacgtgcagaaggagcgccaggcgatagagcagctgatccgccatcgctgcgcggcgctggtggtgcacgccaaaatgatccccgatgaggaactggcggggttaatgaaacagatccccggcatggtgctgatcaaccgcatcctgcccggatatgaaacccgctgcgtggcgctggacgaccgctacggcgcctggctggcgacccgccatttgatccagcaggggcacacgcgtatcggctatctgtgctcaaaccatgatatctccgatgcggaagatcggctgcaggggtactacgcggcgctggaggagagcggcctgccgtgcaacgaccggctggtcacgtttgccgagccggatgaaagcggcggcgaacaggcgatgaccgaactgcttggccgcggccgccactttagcgccgtcgcctgctataacgactcgatggccgccggcgcgatgggggtgctgaatgacaatggcatcgacgttccgcgggagatttcgctgattggcttcgacgatgtcctgatttcgcgctatgtccgcccgcggttgactaccgtccgctatccgatcgttacgatggcgacccaggcggccgagctggctttagccctggcggagcaacggccggcgccggagatcacccatctgttcagcccgacgctggtccgtcgtcactcggtggtcgccccgcaggaaggcgataagtcatagcgatagaggtgcacggcggtggccgggtaatccagtccctcgccgatgtagcgccagccgaagcgttcatagaaatcccggcaggcggagtagagatagagctcccgaaagcccgcgaggcgggcataatcgatcacatgccgctgcagttttccggccagcccctgaccgcgggcggcgggcgcgacgtacagcgccgccagccagggaaacagatcctggcggctgatcaaatcgcagcgccagaggccaatcgtgccgagcaactgctcgccttccaccgcaataaaggtcaacggcagcgcctccgccgtctggctatgctgcacgatgctggcgaagaattgccgcggcagcgtctcgccgccaaaggcctgccacaaccagtcggtcacctgcgggacgtactgcggcgcagcgtacagcggcaggatcgtcataccagcttcccctgaaaaatcggcactgagtcgaacagatagccgtcaaagtcgggggcgtcctcatcggaaagctccagcaggctgtttttgacgttttccagatgctgccacatcgcctgccaggcgcccatcacatcgcgacgccgcagcgcggcgagcagagtctgccggtcgccgagccatttcagccgccaggcgcggctggcaatatgcacattgaactgctgccacagcgggctgctgtccatctgcagccagatccgctctaccgtcgccaacagcatctggttctgcgtcgccccggcgagcaccagatggaacagacgagcgttatcctgcgcggtgtcgttgagagcgattgcccgctgctcctgttcaataatccgcttcagattgtcgatatcggcgcgggtggccattttcgcggcaaaggcggcgatgttgctctccagcagctggcgcgcctggagaatttcaaacgggccgacgtcgctgctgagcagctgctcctcttcgctgtcgttctcgtggggaatgcgcatgacatacaccccggatccctgacgaatatccaccgtcccctgcagctccagcatcagcagcgcttcgcgcacgatggtccggctgacgccataggtttcggcaatatggcgttccggcggcaaacgcgacccgaccgggtagcgcccctgcgcgatctgggcgcgcaggtcatcaccaatctcctgatagggcttcttttccggcggaactatcgctttttccacaaaatcacctgtgcgttacatgcctgcgagtcaaatacgccgctatcttagcaaatattgcccccggctagcggtattcatcatcgatatccagcaccagttcacgccgttcgcccagttgacgaaaccagtgcgccgaggctttgggtcgccgggcgcgatggttttgcagatcgatttcgataagcccgtagcggtttttaaaggcgttcatcggcgatacgttgtcggtaaacgcccacagcatatagccctggcagttggcccctgcctcgcgggcgcgcagggtgtgccacagatgttcgctgataaaacgaatgcggtagctgtcatcgatgacgccttcgcggttacggaactggccttcgttttccacccccatcccgctctccgccacgaaccacgggatgttgcgatagtcattttttatccgcatcgccatatcaaagatgatttgcgggtagatttcccagccgcgggaggcgttcatccgccggccgggcagctcaaacggctcataataccaggccggatggaacggggtgtgcggatgccaggcccgcgacggggctttgacccggtgcgggtagtaaagattaatccccagctcatcgacggtgtgctcgcggataaccgccagatcctcctcgctggtctcccacgtcacctgatgctgctcaagcagcgcgagaagctccggcggccagacgccgtgcaccagcgggtcgaggaacatgcggttgtagaacagatcgtagatctccgccgcgcgcaggtcatggggggcgcgtgagcgtgggtaggtcacctccggattgaggatgcagccgacggtcccgggatagccgagctcgcgaaaccgcttcacgacgctggcggtcgccagcaccttatgatagttccactgcatccaggtgctggtgttctgctcatagggccagcgcagagcatccagatagacccgggtctgcaccacaattggctcattaaaggtaaaccagcgcgtcaccttcgggtggtagcgggcaaacaccttctccgcgtagcgcacaaacagctcaaccaccgttttcgacccccagccgccatacttttccagcagatagccgggcaattcataatgctcaaggcagatcatcggcgtgatgccgttggccagcagcgcatcgaacagctggtcgtaataggccgcatactcctcatccaccgtgacgttttcgtagtcggtcagaaagcgcgaccagttgattgaggtgcggtagtgggtcagcccggccagcttcatcagctgcacatcttcctgaaagcggttgataaaatcggtggccaccgccgggccatagccgttatgccagacgtggcgatcgtttttgtaccagagatcgggccaggagtcctgccctggttttttcccgctccagccttcggtctgccaggcggaagccgccgcgccaaggataaaatcatcgggaatggtcatccgtacggtagtcataggctcctcagacagggttggcggtttgttgattgtctacctgacgctgcgcggcatcggcacggcgggaggcgattttgacgaaaggcagatagataagcaccgcgacgacgatgcagataagctgggtcaccaccgcccccatcgagccggcggtggagagccaggcgttgatcagcggcggcgtggtccaggggaccatcaccaccgccttgccggcgaagccggtcagggtggcgaaatagccgatgctgccggtcaccagcggggtgatgataaacgggatggcgaggatcgggttaagcatgatcggcatcccgaagatcaccggctcgttaatattgaacagccccgggcctatcgacagcttggcgatctctttcatctctttgcgcctggtggcgatcatcaccgcaatcagcaggccgatggtcagccccgagccgccgatgctcatgtagacatcccagaagggcatcgtgatgatgttcggtacctctttcccctgctcaaaagcgctcatattgacggtgatcgctcccagcagcagcggctcgcggatcggcttgatcatctggttgccgtgaatgccgatcacccagaacagctgggcgacgaacatcagcagcaggatccccggcaggctctgcaccacccgctccagcggctgctgcaccacctggtagaccgcatcgtagagatacattcccgtcagctggtgaaagagaaaaccaaaggtggcgatcgcggtggtggtgatgatcgccgggatcagcgcggaaaaagaggcagagacgttcggcggcacggtatccggcattttgatcttcagtcccttgcgcccctccagccagcagtaaatctccactgacagaatggcgatgaacatcccaaggaacagactgcgggtatcggaaaactggcgcagcaggacatctttcaccacgtgcatctggccatcgaccatcatctccaccgtggtcggcgtgacgcagataaagcagatcaccgccaacaggccgggaaacaggcttttgatgccgttgatccgccccagctcaataccgatcagaaacacggcgccgatattgaggaagttgagcgtagcgtagttaagcgcgctggtgatcggcttcagcgccgcaagaaaggagagcgaggaaaagctggcgagcccatttttcggatccagcaccatattggagatcagcaccgaaaaggccccgacgatgatcaccggcatcagggtaataaacgccgatttgatcgccataatgtagcgatagctgttgaatgtcgtcgcgaaacgccccagcgcgtcgatcagtttgtcctgtaatgccataaaagagtacctcagtgtaaagggcttaatgcggccaggtgaacagccagagacttttggcataccaaaacatagtcgccaggcaaaaatagttctgtgacagcgctcgcaacgcgcacagtggtatcccaaatatccgataaaatcgacattggcataccagagtctgtcggctcgtcagttcctgccaaaagcgtgatcgcgatggtttttccgccccgccccgtcgatatgtcccttttcggtctgtgataaactgcgctttaccacgtgaaatcaggaatcgatgaatggctacaatgctggatgtctcaattcgcgcaggcgtctcgaaagcgacggtttcccgcgtgttgaacggcacaggtcaggtgaaagagagcacccgtcaacaggtctttaaagcgatggaagagctgggctaccggcccaatttccttgcccgctcgctggccaatcagaccagcaatagtatcgggctggtcgtctccacctttgacggcttttactttggccgtctgctgcagcaggcgtcacgccagaccgaagcctggggaaagcagcttatcgtcaccgacggccatgatacgccggagcgcgaagaggaagcggtgcagatgctcgccgaccggcagtgcgatgcgatcatcctctatacccggcacatgagcgagaaggcgatcatgtcgctgattaactcgatcgccatgccgctggtggtgattaaccgcgatgtggcgcaggcccgcgaacgctgcgtgttcttcgaacagcaggaagccgccttccaggccgtggagtatctgattacccagggccaccgcgatatcgcctgcatcaccgtcccgatgcatacccctaccggccaggctcgcctgcagggctaccgcaacgcgctgataaaacatggtattgagtgggatccgagccgggtgaagtatggggactcgacgatgacccgcggctacgaactgtgccgggaactgctggacgagaaagcccgcttcagcgcgctgttttcctgtaacgatgatatggcgctgggggcgtcaaaggcgctgcatcaggcggggctgcgtattccacaggatgtgtcgctgtttggcttcgacgatgcgccaagcgcgaaatggctggagccggggctgtcgacggtttatctgccgatcgacaacatgatcactacggctatcgaccaggcgatcaagcttgccaatcagcagccgatagaaacgatcccgccgtttaccggcacgctggtgcttcgcgagtcggtgacgacgggacctttttttaaataagctctaaggccagcagctcctggatggtctggcgacggcggatcagccgcgccttaccgccatcaaacagcacctccggcagcagcggacggctgttatagttggacgacatcgaagccccgtaggcgccggtgtcatggagcaccagataatccccaggcgccaccgccggcagcaggcgggtctcgactttgcccccctcctgctgggtaaagacatccccggattcgcacagcggcccggccaccacggtttcgacctgcggcgcggcgctgagatcccggccatcccccgccagagcggtgatatggtgatagctaccgtacattgccgggcgcatcaggtcgttaaagccggcgtcaatcagcacgaagtgacggctgcccatctctttcacgctgcgcacctgcgacaccagcacgccggactcggccaccaggaagcgtcctggctcaatctccagtttcaccgggtgccccagatgggccgcgatctgctcccgggcgcggttccacaggccataatagtgggcggtgtcgatggcctcttcaccttcgcggtaaggaatcgacagaccgccgccggcggagatggcctgcagatcctggccaaagtcgacgacctggcgcaccatcgcgccgcacacctgctccaggtgaccatagtcaacgccagagccgatatgcatatggatcccgatcagctgcagctgatagcgacgcatcacttccagcgccgccggcaggtggctgtaccagatgccatgcttgctattctcaccgccggtattggttttctggctgtggccgtgaccaaagcccgggttgacgcgcagccagacgcgatggcccggcgacacctcgcccaactggctcagcatgtcgatcgagccggcgttcaccgggatctgtaacgccttcacccgatcgagggtggcgtcgtcgatcagatcggcggtgaagacgatatcctcgggattctgctgcggatcgtagcctgccgccagcgcccgctcgatctcccccagcgacaccgagtccaccttcaccccctgctcacgcatcagacgcagaatatgaatgttagagcaggctttttgcgcaaaacgcaccacgtcgaactggctgagctgggctatctggcggcgaataatctgcgcatcatagacccagaccgggcagccaaattccgccggcaggcgcagcaggttgtccgcggtcaggtcagtatcggtggcgtaaagcgagtgtggcataagaactccggtgcagtacgtgtgttggtcgctgttttttctgattacgccacagtgacagacgaataaaaaatatcgttttatcgcgactctatgcaaaaatgatatggttccagccgagcctcacggagaccgcatgccagccgtcaatttgcgtcatattgaaatctttcacgcggtgatgaccaccggcaacctgaccgaagcggcgaggatgctgcacacctcgcaacccacggtcagccgcgagctggcgcgctttgagaaggtgctcggcctgcagctgtttgagcggacccgcggtcgcctgcagccgacggtgcagggcctgcgtttgtttgaggaggttcagcgctcctggtatggcctggaccgtatcgtcagcgccgccgagagcctgcgcgagttccgccagggcgagctgtcgatcgcctgtctgccggtgttttcccagtcctttctgccgctgctgttgccgccgtttctcgctcgctacccggaggtcagcctgcagatcgtcccccaggagtcgccgctgctggaggagtggctctccgcccagcgccatgaccttggcctgacggagaccctgcatacccccgcgggcaccgaacgcaccccgctgctgacgctgaatgaagtctgcgtgctgcccgccggccatccgctggcggcgcaggcgacgctgacccccgccgattttcagggcgaaaactatatcagcctgtcgcgcaccgacagctatcgccagctgctcgacgccctgttccttgagcatcaggttaaacggcggatggtggtcgaaacccacagcgcggcctcgatctgcgccatggtgcgcgccggcgccgggatctcggtggtgaatccgttaaccgccctggactatgccgatagcggcgtggtggtgcgccgcttcagcgtcgaggtgccgtttaccgtcagcctgatccgccccctccaccgcccgcgctcggcgctggtcgacgcctttgttgcccacctgcagcagagtctgccgcagatcctcacgccgctggcgtcggtcctgcagagagcataaagttgaccgcgtcttccgcgtggatcgccgcggtgtcaaagaccggcagcgggctgagctcggcaggcaccagcaggccaatctccgtacagccgaaaataaccccttccgccccctgctccgccagggcggcgatcgtctgcagataataatcccgcgacgcctcgctgaaggtgccgagacaaagttcgtcgaagatgatctgattgatctgcgcccgatcgtcagcctcagggatcagcgtctcgatggcaaactgctcctgcagacgaccgcggtaaaaggtctgctccatggtatagcgggtgcccagcagcgcgacccggcgctgacctttggcggcaatcgcccgtccggtggcatcggcaatatgcaggaagggaacctggcagcgggcggcgatggcatctgcgactttatgcatggtgttggtgcacaggacaatgccttcggcccccgcctgctgcagcccgaccgcggcctcagcaaggatctctccggcgcgatcccagtcgccggcggactggcaggcttcgatgtcgtgaaaatcgacgctgtgcagcaccaggctggcagagtgcaggccgcccagtcgcgccttaacgccctcattgatcaaccgataataggggatcgtggactcccagctcatgccgcctaacaggccaatggttttcatcttctgctccttatgtcgtttctgccagtgaagcaaacttgtgatcaactttccacttctctggccgcgtatttctttttcatgaagagtgggataagttaaatgaaacaatgtttcactttaacaacaggatcgccagatgtttatttttcataaagacaccacccttgaagacctcggcaatggcgtaacccgccgcattctggcccacgacggcaaaatgatggccgtggaggtgaattttgccgccggcgccgtcggcccgatgcataaccatcctcacgaacagctcacctacgtgctttccggcgagttcgagttcaccatcggcgaggagacgcgcgtcgtcagcgccggcgatacgttgtataagcggccggggattatgcacggttgcgtctgcctgcagcccggcacgctgctcgatacctttactcccattcgcgaagattttcttgaaggctaatccataacgggggcgttcgccgtccccggttactgcccggcgcccttcaataaaaagatgcggccacaatcattatcctggtaattatatttcccgctcagttaagcctaatttttcattcctttcagacgccctttacggccaaaatgcttaccacctcacctttttgaaacatcgtttcgactttgatcacatttccatcctgatctgcatgacgcagaaacaaatcgcaataaaatgaaattaaaacggtgttttataaaaaacagttccgcataaaaaaaggggctgacagcccttacctgctagaccagttaaagaataccccattaattaacaaggacatgttaagcagaggaagcgttcagacatttttgcgttgtcaggcgtaaaaggccgacagcgcggcgtcaccggatccgtattacaactcgtaagccaggtaggtatgtatgaatgaaaacaagctgctgggattggcatggatatcgccctatatcatcgggctgatcgtctttaccgcttttccctttgtttcatctttctttctcagttttaccgagtacgacttgatgagcccgccggtatttaacggcatcgaaaactatcgctatatgttgaccgaggatagcctgttctggaaatcgatgggggtgacctttgcctacgtctttttaaccatccccttaaaactggctttcgccctcggcattgcttttgtgctcaatttcaaactgcgcggcatcggctttttccgcaccgcctattacatcccgtcgatccttggcagctcggtggcgattgccgtgctgtggcgcgccctgttcgccattgacggcctgctgaacagttttctcgccgtctttggcattgatgccatcaactggctgggggaaccctccctggcgctgatgtcggtcaccctgctgcgcgtctggcagtttggctccgcgatggtcatcttcctcgccgcgctgcagaacgttccgcagtcgcagtatgaggcggcaatgattgacggcgcctcaaagtggcagatgttcatgaaggtcaccgtgccgctgatcaccccggtgattttcttcaactttattatgcagaccacccaggcgttccaggagtttaccggcccgtacgtgataaccggcggcggtccgacctattacacctacctcttctcactctatatctacgataccgcctttaagtacttcgacatgggctatggcgccgcgctggcgtgggtgctgttcctcgtcgtggcggtctttgcgtcgatcgcctttaagtcatcgaaatactgggtcttctactccgccgataagggaggcaaaaatggctgatattcaacagatggcgccggtgatgagcgacgccgatcgtgaggtcgcccgtacgctgcgccgggaaaaggtgagccgggtggtgcgctacgtcgtgctgatattcgtcggcctgctgatgctctacccgctggcgtggatgttctccgcctcgttcaagccgaaccatgagatcttcaccaccctcgggctgtggcctgcccacgccacctgggacgggtttatcaacggctggaagaccggcaccgaataccatttcggccactatatgctgaacacctttaagtatgtgatcccgaaagtggtgttaacgatcatttcctccaccatcgtggcgtacggcttcgcacgctttgagatcccgtggaagaagttctggttcgcaacgcttatcaccaccatgttgctgccgagcaccgtcctgctgatcccgcagtacctgatgttccgcgaaatggggatgctgaacagctatctgccgctgtacctgccgctggccttcgccacccagggattcttcgtcttcatgctgatccagtttctgcgcggcgtgccgcgcgatatggaagaggcggcgcagatcgacggctgcaactccatccaggtgctgtggtatgtggtggtgccgatcctcaagccggccattatctcggtggcgctgttccagtttatgtggtcgatgaacgactttatcggtccgctgatctacgtctacagcgtcgataagtatcccatcgcgctggcgctaaaaatgtctatcgacgtcacggaaggcgcgccgtggaacgaaattctggcaatggcgagcatctccattctgccgtccatcattgtcttcttcctggctcaacgctacttcgtgcagggcgtgaccagcagcggaatcaaaggttaagagggaaatatcatggctgaagtgattttcaacaaactggaaaaagtctactccaacgggtttaaagcggtgcatggtatcgacctgaagattgccgatggcgaatttatggtgatcgtcggcccctccggctgcgccaaatcgaccaccctgcgcatgctggcgggtctggagaccatcagcggcggcgaggtgcggattggggacaaaatcgtcaacaacctggcgcctaaatcccgtggcatcgcgatggtgttccagaactacgccctctatccgcatatgacggtgcgcgaaaacctcgcctttggcctcaagctaagcaagctgccgaaggcgcaaatcgacagacaggtggaagaagcggcgaaaattctcgaactggaagaactgctcgatcgcctgccgcgccagctctccggcggccaggcgcagcgcgtggcggtgggccgggcgatcgtcaaaaaaccggacgtcttcctgttcgacgaaccgctctccaaccttgacgccaagctgcgcgcctcgatgcggatccgcatttccgatctgcataagcagttgaaaaaatctggcaaaccggcgaccaccgtctacgtcacccacgatcagacggaagcgatgaccatgggcgaccgcatctgcgtgatgaagctcggccacattatgcaggttgataccccggacaatctctaccaccagccgaaaaatatgtttgtcgccgggtttatcggcgcgccggagatgaatattcgtcccagccagctggttgagcacggtggtcgcctgtatttgacgctgggcgatcagcggctgccgctcaacgatcggctgcaaaacaaagttgaaacccataagaatcagcaggtgttctttggcgtgcgcccggagtttgtctctctctccgatgaaccgtttgccgaaggttcctgcgcgggtgaaatggtacgcgtagaaaacatgggacatgaattctttgtttatctcagggttgctgattatgagctgaccgcccgcgtgccgtcggacgatgcgaagccgatgattgccaagggactgaatcgcaaagtctatttcacctttgatctcaacaagtgtcacatctttgacgccaaaaccgaacagaacctctctctgtgaaccctggagcataacaatgaaaaacgtgctgataagcgccaccctctccgccaccctgggccttagcgccttctcttcgctagcgcaggacgtcgacctgcgtatgtcctggtgggggggcaacggccgccatcaggtcaccctcaaggcgctggaggaattccacaaacaaaacccagacatcaacgtcaaagcagaatacaccggctgggacggccatctttcacgcctgaccacccagattgccggcggtaccgagcctgacgtgatgcagaccaactggaactggctgccgatcttttcgaaaaatggcgatggcttttacgatctgaataccctgaaagacgagatcgacctcagccagttcgacgccaaagaactgcagtccaccacggtcaacggcaagcttaacggtattccaatttccgtcaccgcccgcgtcttctactttaacgacgaagcatggaaaaaggcgggcatccccttcccgaaaacctgggatgaactcatggcggcgggaaaaactttcgaaagcaagctcgggaaacagtactacccggtggtgctcgaacaccaggacgtgctggccctgctcaactcttatatggtgcaaaaatacaatcagccggccatcgatgagaaagggcgaaaattctcctacagcaaagcgcagtgggcggatttcttcggtatgtataagaagcttatcgacagccatgtgatgccggacacccgctactatgcctccttcggcaagagcaacatgtacgaaatgaagccgtggatccagggcgaatggggcgggacctacatgtggaactccaccatcaacaaatattccgataacctgaagccgccggcgaagctggtgctgggggaatacccgatgctgccgggcgccaccgatgctggactgttcttcaagcccgcgcaaatgttgtcgattggcaaatcgacgaaaaacccgcaggcggcggcgaaagtgattaacttcctgctgaacagcaaagaaggggtggatattcttggactggagcgcggcgtgccgctgagtaaagcggcggtcacctacctgaccgaggatggggtaatcaaagccgacgatccggcggtgtccggcctgaagctggcgcaatccctgcccaccgctctgccggtctccccgtacttcgacgatccgcagatcgtcgcccagttcggcaccaccctgcagtacatcgactacggtaaaaagtcggtggaagaagcggccgaggacttccagcgccagaccgaccgcattctgcgccgcgcgatgcgctaacctgcccgtctgaactctcccgcggcgcacgccgcgggagggtctgccagaaggccctgtcagaagaaatatttaaagcgcacccgggcgccgtagcgttcatcgggattcccgctcttcgctgccgtggaatcgagccacgaggcataggcgccaaggtaaatattgaagttcggcatcgccatgatattcggcaactgccaggaggtgtgcagggtatggatgtcatagcgccccggcgccaggatagcgcaatcgccatcgcattcgctggtcaccccggccatattgaactggtcgattttattgtgcgcatagatatagcccagctccacgcgatgccaaagggcgttgatcccggcgctgaagtcggtttcgtccgccgcgtccagcagggcggtactcagattgaccaccgccccatcctgcggatcgcttttcagggtgttccagctcatggtcagcccgtagccggtgcggtttgactggtcgacccagcgtccgctctggctctgatagccgtaagcattgttgacgagattgctctctatcgccgcggccgccgaccaggcgccggactgccacgccgccaccggccgcacgtacaccacatttttgcggttttccagcgcgttaccatgatagttctgatcgacaaacagcgaactgccgtcctccaccagggtgttaacttcgaaataccagttatccaccgttttgctaaacagaaggttaccgccgctgctgctgcgcccgcgcccctctttcatcatgtaaatatagccatagccatcggaatagagatcgttggcggtattacctgaatattcaataaaggtatcctgattcagcgggaacatatcccaggcttcaaagcggcctatttttattttccagtcatcctgctggccgaagaaaaataccgcatcatcaagattcattttgccatccatatccgccagaggctgcacgctgaatccggcatattgcccgtcggcgccattccgtctgccatcgaaacccagcagaatacgaccgttaatatcccagcgctctttatcgccgggcgcccagcttttattcgcgctggttttgaccgacgtcagactgccggtgcgactggcgccatcgaggttaaattcgacgtcgccataaaattttaattcgccattgtcatttagctgcaaacgcggcgaagcaggcgccgcgcgggcgaccgtcgcggcctgctgctggcctttcagcgtcttaatttccgcctctgcgctggcggcgcgcgcctccgtcgcctttagccgctgctccatttgcgccagtcgctcctccagcgataacggcgcctgcgccataacggatggcagatacagagacgtcagaaaacacccgacccagattttattcatcggtaaacccttttattatggaatgaactgaattttttattaatgggtaacgcacgacgatgcaggcaataataacccgcccatcgtcaaagacgggttattaacgacaacagccttattattattcgagctgccaggcgccggcttcggttaatgccgccgcgccgctccaggcaaataacgctaattcacggcggggagcctgcggatagatacggctgctcaggcaggcttcgccgtcattgacaaaaacctccaccgaagagctatcgaaaaatattcgcaggttgagatccgccccggcggtcaacggcacgctgcgcgtcccgcacaggccatactgcggataatgccgttccagcaccagacgctgctgttgggcatccacgtagatgcgcagcccatcgccaaagcgcagaccatactgctcggcgctgctgcgggcgcagtcccagcgcagattcacctccatcgcctcgcagttgtcgaccatcgtcgtctgctggttgttcagggtgctgaccggccacgggaaccaggcgccgcgcaggctctccacttctttcgccgggcgcatctgcaggcggtcatccgcgctcaggctcagctcgcgcggcagggagagcatgcccgcccagccgtcctgctgctccggcagcggcgattcccacatatccagccagccaatcacgatccgccggccatcgggggtggcgaagctttgcggggcatagaaatcgtggccgttatccatctcccggaattcgccatggcgaataaaacgctggcctggctgccactcgccgatcagatagccgctctggaacagattgcggttgctgaaccccgcggcctgcatcccctgtggggaaaacatcagaacgcgtttgccgttgagggtgaagaagtccgggcactcccacatatagcccatggtgctttccgcttcatccagcacccccgcgtcctgccactggcgcagatcggctgaacggtacagccgcacctggccggtatcgccttcgcgcgcgccgacgatcatgtaccagctatctccctcacgccagaccttcgggtcacggaagtggtgcatacccggcggggtgtcgaccaccatcccctggcgctcaaagtggatcccgtcgcggctggtggccagacactgcacctgatacagattggcttcgtcgccaggatcgccgtggaacttatgcccggtgtaaatcagcgccagggtatcgccatcgaccaccgccgagccggagaagcagccgtctttatcctccgggccctccggcgccagggctaccggcaaatgctcccagtgcaccagatccttactgcgcgcgtgcccccagtgcatcggcccccactgggtggagtacgggtgatgttgataaaaggcatggtaccagccgtcgaaccacaccagaccgtttgggtcgttgatccatccggcgcgggccgccaggtgatagtgcggataccagcgcaggttcagcgcctggcgttgtgtctggagtacctgttcagcccgggagattgtgtaagtcatcattttcactctttttgattcagatagcggtaggttgcgacaccagcggatcggcggaggatttgccggagcgcaacaagaagatggaaataaaggtggtgcagaacaccagcaggcccatgatcaggtaggactgggcgaagccatatttttcatagctgtagcccgccagcggcgacaatacgctggcgataatcgagctggtgcaggcgaagcccaccagatagagggtggaggagagacgtttatcgaagttgaggctgttgtacttaaagatagccaccagcagtatcggcaactccaccgcgtgcagcagtttggtgatggagatcagcagcggcccctccaccagaccggaggccaccatgcgcatcgccatcaccatgccggcgaaaatcagaccgtttttggcgccgatgcggttcaccagccacggcgcgcagaacatgccggccgcctcgaggaacacctggaaggagttgaggtagccatacatctcattgccttcctgcagggtcgcgaactgcgatgagaaatagaccgggaactgctggtcatagacgccgtaaatgcaggtgccgatgacgaagaagaccagcgcccaaaagcgcggcagcgtcagcaggcgcagcgcatcttcgagggtcaccttaccgcccgataccgcctcctgcatcgcatgcggcgccgaggagacccgcagccgcgccaacaggataaagaacaccagcccggaacagctggcgacgaggaagtttagctgcggattgatgttaaacagcaggccggcgaagaaggtggccaccgcccagccgagcgagccccacatccgcgccctgccgaattcaaactggctctgacgcgccaccctctcggtgtaagattccagcacgccgatgccgccgttaaaggtcaaaccgatatagatcccgccaaaaatgctgcccaacaggacgttgattttcagcaggtggccgaacagcagatacgccggaccagagaggatcagcagcgcggtgatataccagagcagatgtttgcgcagccccagcttgtcctggataaatccatagcaaacttgcgcaaacagcgcggaaaccgacagtacggcatagataataccggtatcgcctgccttcagcccaacctcctggtgaagccagatagagagcaaggagccggatgacgaccaggtcacaaaaaagaaaaatagtaaggcactgagcaacgggtagctgtgtgagtgaggcgctttcatcatgacattctcgtgttagaggaatgcaattatggtaacgttaacaaaaaacaaaacgcaggtggattcgctgcgatatatgatgttaatcacaaaagttaacgttaacataatgaagatgcgatcgcgatcaaaaatcaaccgcaacatagctcacgacggcgatagcagaaaatcgtttcactcttttacatcagcgacttagttgtatagcctgtactctgcggcaatggcggaggaaaaaatggcgtccctgaaagatgtagcaaaactggcgaatgtatctctgatgaccgtctcacgggcgctgaacaccccggagcggctgaagcctgagacactggcccgcgtgcaggccgccatcgccgagaccaactacgtccccgacctgtcggcgaagaagatccgcggggcgcgcgccacccccagcaccatcggcgtgctggcgctggataccgtcaccacgcccttttcggtggagatcaccctctcgatcgaagagacggcccgcgcccacggctggaacagctttgtggtcaatatgttttctgacgatcgtccggaagcggtggtcgacctgctcctctcccaccgtccggacggcattatctttaccaccatgggcctgcgccaggtaccgctgccggaaaaactgctgactctgccctgcgtgctggccaactgcgaaagcctcagccagccggtggccagctatatcccggacgatgaacaggggcagtacgacgcggtgaaagccctgcttgccgctggctatcgtcgtccgctgtgcctgcacttacccgccagccagccggcgacgatccgccgccgcctggggctggagcgcgcctgccgggaggccggtatcgaaccggaccatctgagccattcgtatatgggccagggcgatgagcattaccacgatatcccggcggtggtgctggcgcatatccgcgagggtaaacctggctttgactcagtgatctgcggcaacgatcgcatcgcgtttatggtctatcagacgctgctgggccaggggttacgcattccacaggacgtggcggtagtgggatacgacaacatggtgggcattggcgatctgtttctaccgccgctctccacagtgcaactgccgcattatgacatcgggcgcctgagcgccctgcatatcattcacggcgacaaccatcgggagacgcgcaaagtcgccagcccgtggttgccgcgcgcctcacattaacgattaccgatgttgcgcagcttctcgcccgccatcaggttgcgctcaatgtgctcgagggtgacattcttggtttccgggatcagccagaaggtgatgccgataaaggccacgttgagcgccgtgtagagccagaaggtgccggcggcgccaatcgcgtcaagcagcgtcaggaaagtggcgccgatgatcatgttcgacacccagttggtggtggtcgagcaggtgataccgaagtcgcggcattttagcggctggatctcggagcagaggatccacactaccggcgccgcgctcatcgcatacccggcaatacacatcatggtcatgccgacggagagccaggagaggccgctggatgcggtgccattgtcgaactgcatcaggcagtagcccagcaccagagtgcccagcgccatcacgctaaagccgattttcagcgctggcttgcggcccgctttatccactgtgaacaccgcaataaaggtggcaaacataaaggtcaggcccaccaccagggtggcgatcatctgctgttcagtagtggtaaagcccgccattttaaagatacgcggcgcatagtacatgatgatgttcatgccggtgaactgctgcatcgcctgcagcagcatgcccaggaacaccgcccggcgcacgttacgattgaccttaaacaacgcccaaccgccctgcttcagcttgaggctctcacggatctcgttaagctcgtcgcgcgccttttccgaggtatcgcgcagcatccgcagcacttcttccgcttcgatatggcgtcccttctccgccagccagcgcgggctgttcggcaaaaagacgaccagaatgatcaggatcaccgccggcagcgccagcacgcccagcatggcgcgccagttaccgctgtagctaaaggcggtatcggaaagaaacgccagcacaatgccaagggtgaccatcagctgatacatactgatcattttcccgcgcacgttctcgctggccatctcggagaggtacagcggcgcggtataagaggcaatcccgactgccacgcccaacaccacgcgggccaccagcagcacctccacgctggcggcaaaagcggatccgatagagccggccacaaagagtacggcccccgccatcaggctgtatttacggccaaggcggaacgacagccagccgttaaacagcgcgcctatcgccgcccccaacatcatgctgctaaccacccactcctgaagctggctggataaggtgaaatggtcggttataaagggcaacgctccggatatcacgccgatatccaggccaaaaagcaagcccgccaccgccgcggcgatggaaacaaaccagttcatccgccgggtatcacgttgcgtccgcggcgataatgtagagtcgttactgattgaagtcatttttttcctgccacacagagtaagacataagacgaaagtacgtgactggtggatgaatgggtcaggcaggataagccaaagatatggactatattgctggcaggatgggttttgtgatggacattaaactttcaaagtaacaaaaaatgcgtttccaatagttaataaccctgtttatacagagcggtaacattatacctgtgttcaggagtatggacgatccgcacttttgcgtatggacaataattgctcagaaggccggagcgataccacagaccccggccatcgcggacggttagcgcgccagccagccgccgtccaccgccaccgtgtagccattgatgtaatcggaggctgaggaggcaaggaacacgactggccccatcagatcggccggtagcccccagcgcccggcgggaatgcgatcgaggatttcgctgctacgctgctcgtcggcgcgcagctgctgggtgttgttggtcgccatataccccggggcgatggcgttgacgttgatgttgtgtttggcccactcgttggccaacaggcgggtgacgcccatcaccgcgcttttggatgcggtatacgacggcacgcggat
